United States Patent Application Publication US 2021/0254182 A1 - sequence listing, part 14

SEQ ID NO: 95 - DNA, 3285870 bp, Phytopthora sojae (residues 1-1,642,935 of 3,285,870)
  misc_feature (263648)..(263747): n is a, c, g, or t
  misc_feature (557455)..(557554): n is a, c, g, or t
  misc_feature (574954)..(575053): n is a, c, g, or t
  misc_feature (608463)..(608904): n is a, c, g, or t
  misc_feature (891296)..(891395): n is a, c, g, or t
  misc_feature (1473100)..(1473199): n is a, c, g, or t
  misc_feature (1644637)..(1644736): n is a, c, g, or t
  misc_feature (1963014)..(1963113): n is a, c, g, or t
  misc_feature (1971813)..(1971912): n is a, c, g, or t
  misc_feature (1986489)..(1996354): n is a, c, g, or t
  misc_feature (1997814)..(2000634): n is a, c, g, or t
  misc_feature (2003454)..(2003583): n is a, c, g, or t
  misc_feature (2004939)..(2006871): n is a, c, g, or t
  misc_feature (2009031)..(2009454): n is a, c, g, or t
  misc_feature (2012268)..(2012844): n is a, c, g, or t
  misc_feature (2014433)..(2019979): n is a, c, g, or t
  misc_feature (2021786)..(2026103): n is a, c, g, or t
  misc_feature (2027741)..(2028336): n is a, c, g, or t
  misc_feature (2037277)..(2037430): n is a, c, g, or t
  misc_feature (2041554)..(2041799): n is a, c, g, or t
  misc_feature (2043760)..(2044451): n is a, c, g, or t
  misc_feature (2054153)..(2054252): n is a, c, g, or t
  misc_feature (2637149)..(2637248): n is a, c, g, or t
  misc_feature (2647589)..(2647695): n is a, c, g, or t
  misc_feature (2648947)..(2654178): n is a, c, g, or t
  misc_feature (2658887)..(2659925): n is a, c, g, or t
  misc_feature (2697604)..(2697703): n is a, c, g, or t
  misc_feature (2705828)..(2706718): n is a, c, g, or t
  misc_feature (2708369)..(2710022): n is a, c, g, or t
  misc_feature (2715780)..(2715879): n is a, c, g, or t
  misc_feature (2718593)..(2725319): n is a, c, g, or t
  misc_feature (2742971)..(2745532): n is a, c, g, or t
  misc_feature (2746812)..(2750862): n is a, c, g, or t
  misc_feature (2868256)..(2868355): n is a, c, g, or t
  misc_feature (3079580)..(3079679): n is a, c, g, or t
  misc_feature (3096167)..(3100856): n is a, c, g, or t
  misc_feature (3102732)..(3107068): n is a, c, g, or t
  misc_feature (3148356)..(3148455): n is a, c, g, or t
  misc_feature (3167670)..(3178447): n is a, c, g, or t
  misc_feature (3180006)..(3180268): n is a, c, g, or t
  misc_feature (3183977)..(3187070): n is a, c, g, or t
  misc_feature (3190222)..(3193398): n is a, c, g, or t
  misc_feature (3214568)..(3231537): n is a, c, g, or t
  misc_feature (3237094)..(3237376): n is a, c, g, or t
  misc_feature (3254227)..(3267931): n is a, c, g, or t
  misc_feature (3275636)..(3276075): n is a, c, g, or t
  misc_feature (3281646)..(3284794): n is a, c, g, or t
cctaaaccctaaaccctaaaccctaaaccctaaaccctaaaccctaaaccctaaaccctaaaccctaaaccctaaaccctaaaccctaaaccctaaaccctaaaccctaaaccctaaaccctaaaccctaaaccctaaaccctaaaccctaaaccctaaaccctaaaccctaaaccctaaaccctactattcacgtttcaccttatttccactatttaatcacatctatcttttctttatttcctttttttaccgtcatccacgtcccctaccaaattatacacttttcaatcatacacatatattctacttcgtatacctcattttacactaccttttcacgcacctattaccatatcgcatacctacttccacatctgctatctccatttaaccagcacatctctctcttatttttaatttacaatccacctttttacccacccctactctcactttccaacctcatttatctactttttacctcatatccacgattcaaacgtcgcaaacctacttcccacatcccattcgcgcacctcatacctaattccacatcgactacctcaaatcaactacgaaccctttctctccatcctacaacccaccctcacctgttacacctttcgttttataattcttttcttacatccttacatatctttttttaactacgctcgttttttaccttttactctactaatttcacacactaatttctatttctttccatcctacaatccacttctcaccacaatacacttacatccaatgtttctacttccaacctcatacctgccaaccaaccacacacaccctgtttcacacaacttttttcactctcttttttcctatctacaccaaccaaatctatgcagccatcaccttccttaacccccccccccgcactcgcgaggtttttcggtccctggctttgatcaatatacaccatgttaaagtatgcgtacttgatctaactattgccttccgtaagtacgacacatttctataatttgcgggaactggttgacacagacagacgcacatgttgtctaagacgccctcggatgggtagctaaatttcaacagggtgtatatactacaacttgcagtgtccttttattgatggcgaacaaaaatcaaacacaagggcgggtttatgcttgaactatcctatgattgcatcccaacataccaggatatgcatgccttgaaaacaaaaaaactgctgtacctagctagcaatcaagtgacacgtcttcccaaccgcgggctaatggcgtcttagcattattataacgcacatcctgctcggttttattgaattgggccacctccccaggctgcattctctctgaggggtgcatattagtacttacatgcgcaatataagtttacctcttcttttacataccctggtatatcggacgagattcatcttgcatttccactatgcacaatcatgtatcatatcctgtctaatctgatcggagaacccagggcattgtagaggtagcaccatgatggggagagcggttcctattagcaatctgtaagcaatcaaattatcagtctaatccaccattctctgcaattcctactcgttcgttgtgcatattttcacctacacctgtgcatttcacgtagaaaaagacgtgctgatctttttcataacatgtagtcatatacaacgtatgagtgcgggggggggggttaacactatctcacactcctcttatcaccaccactcctatctcattctccaatcgcatcatcttgcccccattctatattcaccccataacaacatgtattacactttatgcacacattctacccttcctccgctattaaccaatttcatccaaacatcaacttccttcgatctatcctacaatccactaccaccatctacatcaatacccccccccaaccttaacgtccacttcccgcctcacatccaccaaaccaaacccatctaacattctacacgcacctcatttccacacccccaccaacttacacatcaaccaacccaatttgattatcacatactccctctccattcttcaattcactcctcatctccactttcacccacacacactaaccaactcatccactaaccaaccacacctatccttttttacacaccctgtttacccactccacccttcctgtctttgtgcaagctccatacaactaaatgtgccttctctccaacttaaaatgcactttccaacacaaatcccagtcctatcctctaacttaatagcctgtctacagcattatatcctcaaaccaaccacttcaatccaactctacacaccacatttccgtacaccacacaactagtttgcatatcaatcaaccacattaaactaacaccttccttccgccccctattggattaccctctttccacctcgtctctaccaacccaccagatattttcaacttagcacacattatttatacacttcaatttgtcatttatattcatcaactccatgtatattatacaaagaatgcgactgactgtcttttaatattatttaaaatatatgtttggatgctaaaactgaaatcggtatgatcaaaaacgcgccctcctaaaatatcagctccgcaggcttcatattatatttgctccataacaacattgacgctagctgttatttatagagaacttcagcctttctctggcacgtatagtaataaaaataaatgccccactgatgaaaacctagggtccccaaatttcaggtgctgcagccgaattaactatttacctttcaaaacttatattaccttgtataaattatttataagttctcgcgtttataggttttcaatggacaaaaatcgttggctttccctcagatcagtaacgtgtcactaaatcgggggtaccgaaattaccacaaagaaaatccgaatttagtttattttcggcaaagtagatgaacattcgtggaccctagatcgacgtctaatttcaggaaaggagaccatagaaaggcctatgatgaacgttcatccgggtcgtaatgtatatagggtgcatggctctaatcacaacgactgggttcgagtcacccattacacctttttctcctttgcaagtgtttttttagtgccgacgaagtgtagacatttataggtggcggatattaccagccgacgtgcccgatagtacctccgcattggtggtaggggtgaagggccgcggcaacaagaagccaaactctctagaagcccgcaaagtcattttacactctcactcttcatttttccgaccgaagctcaaaacaacaatggcgacgcagaagtacgcagccccttgtggaggttgcggggcacccgtggttcctgttcactgttgcccagtgtgttcttgtcatgtgcacaccttctgtaggcgtcctaccggaaaagaaggctttgggcagcctgttatctgcccaaagtgcgacaagccaacgcatcccgacggacccgcccctgccgctactccaacgccgccaaccactaccacaaatgttgttgtcgacttgctcgatagcgaatcagacgtcgaagacaaggcgccatctccattctcggaattggccacgcctgccgcgagcgctgccgccgagctgctgaatagtaagtgtggtgtagtgcccagcgaggaagcgggcacgtcggcgtcggtgaaagaaggcgccgagacgaatgctgatggatgcggatgatgaactcgacgcggattgatgggcgcgacgcagggccgagctcgacgggaaagtcggcgtgggtgatgggccgtgagacacggtgccagaatccagtgcgacgcgtaatcatccgacgggtcgaccagcgcacccggttctgcaaaacgcgccgaccctaaaccccgccgagcaacgcgccgtggtaagatcttgattgcgccacgcaaaccagattgaaggacggcagtgcaagcacgacagaagtaaagataggcacagaacggtaggcttagcaagcagtagtacagagtagccagtagcaaggacataggacagggtaaggcctcagtcccgaaatttctatgaaccacaaagacctcccgtcttgtccgaggttccaagggagccaccaagcgccggcaagtatagccgcctcgatatcgcggccccccgtcgtttgctggttcgggtgctcaccccccacagacccgtgctggaacaaaggcacgttaaaggtataccgtttaggtgggcgcccgataacgcgctgcctcgacgaaggaccgcactggcctgataaccgccgtgcacaagcccccctgtaggcccgataacgccacacaagcccaaggaaacgccgaggaaacgccggcccgataatgccgcacgcccgacgggaacgccgaggaaacgccggcccgataacgccgcacgcccaaggctcgatgccctacgacaaggaacaagcgtcaacacaagaacccccaactccgaagcctgcgaagacttgggcttgtatttcgaagataagctactccaacaaccgggaataatttgctcggcgcgaccgctatcgagacgcgccgagtttgtgcgagatcgcattcgcgagatttctgcgagggcgctactccacataagcaccatgacgactacgaagccgccactacgtcgccgactctccccttcgaactatttggtcgccatactgaatccgtgagcagcattgctcaacgccgaaaggttgttagatggatgcaaaaacatgaagcgatccgagggggtgaaggcgtgttttttaaggccgtccctcagtttcctgcgattttcatctcggcaacgaaagctgccaacctggccaaggcgttgggctggtggaagaagagggacccgattttgaacgcagaccggggaatagttgtagtctcggctcatcgacgtgggggaagacgtcgtgtcagcacgaaagtgattggagggcgtgggagaccaaggagcgcctgggttgaatggctgtaccctttgcttctgggcgagtttgatcggctgagaacgcttggtgtgaaatttgaccccccattgctcctgcagtactcagcagctttgactcaagctcatccctcaccatgactttgaacggcttgaacacagccacatccagtggctggtacatgtgcgtcgcattcggtggcaacgctagtaacatgatccccatgtcgaatgcagctccaacggactctggtacacaataatccgtcaaaaccgattagtaagtccaaatcagtttagagaggaaattagcaccgcaacttcaatacgtaccggcagtcgaaactctcgccactcgcgaccgggtacgtataaatcctcgatcggcccacacgaaggctgcgtgtcataaggttcgtcatcttcagcactctgcgactttagcagtggtaccatgacctcgtccggaaggcgtgcggtgccatggcatagatccagccgggatcatgatgtccatcccaaggaccacatccaccccggcactgtggtccattatccacatttcaaattcgtagacctgctcccacgacgtgcaactctccaaaaaggtcgcaatccaaattgcttgctctgcctacgaaacggccatcatgggtcggcctaacaacgctgtgagcgggtttaggtccacgggattgtacccgccctcgctcttcaacatgaccaagcgcctgagagtctacacgaacggcggcgcgagaggcgaggtcgggaaagaggcgtggctcaagcgacagcgcgacccggtttgactggaggctcgctcggagatcctgaccctgccaccagctgcagagacgctaggtaagaaagctagattgactgttgacatcgaaggagagctggtgtcaaacgatgcgctttgctagagtcaacctactaaactcggtgctctcgtacactaaaatgatcactgcactttgtccctcaatatggttcactatatcttctgcgataattggtcgcttacatattgtaggccactcccagacttattcatacttcctctactacgattaacctacatgaataatgcaatcgttctaacaacgccgtagaaagaatttcccgacagcatcgagaaccatgcactcaattggtgttttaagttagtatcacatttggtccatctcatgtcgtcgcatccccgcgacccttcgctcggctgtcgcacggtgtcatattcggtccgtctcacggtggcgcacttctggaaatactcctgggacggttttgagacgttccattcctcgcgtttcacactgtcgcacttttgcgcctcgttgccaccgaatttctccacctgcggcccttcgtccggctgtcgcatctcgtcacattggagcgattttccatcgaattgcaagcttcgcgccgcgtcgcccgacgaatcttcgacgggttactcggttccaggcgcatcagccgggcgtcccgcatagtcgcttcgcatagtcgcttctctgcgacccttggtccgaccgtacgcacgtcgttatcacgacggctatttccgtcgtcatctcgcgtaaccccgtcgaggggctgtacttcggtgacttgtcgtccggcgatgccgccgcttcagacacacacgtcggtcctgctggcagtgagctctcgcgacagcaactaggtacaatctcggctcactgcccgtgtgatcttcctcctcttgctcacctcgaccgcatcgtattccaaatcttcgtatgtcggccatccatacattggccagacaagttcgtcatcccgccaggtatcgtccccgtcccaggtcactgcacacgccaggctctgccaatcttggtaatttcgattagtcgccagtacgaagcggggcgcgagcggaaacacatcggagggtgtccaccagcctactgtcatgcctgcgtcgagcgttattgtctcgtccgtgacgttggtcacccgcaggtatgtttgtcgctcgatcttagtcttaatcatggttgtaacccacgttttgctgcgcgtgacccacaggcgcggtgcatcccggctggaacgcaggcggacgtcgagtgttcgccctgggtcgagttgctcgagcgcatcgagtgggaccggtcgcactcgtgcgtcgtaacgcgattgctcgggagtcgtcgaggcccgcgccgtgcccaacggtcgcctagatgtcgtcgcaaccggcactaagacggacccagatgaccccagccaaggtttttgtccatgcgcagctgtggaccatcgaagtcgcggaggtgcggccgatgtgacggagcacgtcgtagtggttgcaatcatcgcccgctgtctgagtgcatcgacctcaaggttcatccgatcgtcgaagtcgctgcccgagccgagacgcggccgaggacgtgttgtagagcgctcgccgacggacatcacggcgtgattaccaagttcttgctggtgcatctccttcgacgcgtcccgcgtagacattttctgcgtcgagtgttttcgcgtcgagtttcttggctcgacatgaaccgcagagacatgggtattcgacgcctgagttgtcgtagacttcgtgcttgcctcttccagcgcctaaggaattacatccttcagatccggcagaattgtgagccctgtgactatcgaagtccggcgccacgaaggggcccgtgaattttctcatcagcatgggcttgaggaagaccaagattgggtcttgctctagcagacggaagagctccgtacgcaccacgacgtaccgcacttcctcgacggtgtactggcgtcccgcgtccttctctttcggcttggacagcgactcctccgccgagtccggcgcgtgccgcttcttcttcttcttcttcctcttaggcgacttgggcttggtggcggccttggcggtgggttgttgttggtcgtcggcctttgcaggtttccgaccagtaggaccgcgactccctcgtcgggagccacatcgggaacgactaactgttcttcgtagccctcctggtcgtcggtggccccatggcctgtcgtgaaggttccctcagagctccacgacgcgacaggtctctcactgtgctctcttgcagtcggcgaccttccagccgaccgcgcacttgcctccgatgccacttggatcgttagtccgtcattcgaagtagtactcccgggtcgcggcaccattgtagagtagcgccctcgcagaaatctcgcggagtcgatctcgcacaaactcggtgcgtctggatagcggtcgcgccgagcaaattattcccggttgttggagtagcttatcttcgaaatacaagcccaagtcttcgcaggcttcggagttgggggttcttgtgttgacgcttgttccttgtcgtagggcatcgagccttgggcgtgcggcgttatcgggccggcgtttcctcggcgttcccgtcgggcgtgcggcattatcgggccggcgtttcctcggcgtttccttgggcttgtgtggcgttatcgggcctacaggggggcttgtgcacggcggttatcaggccagtgcggtccttcgtcgaggcagcgcgttatcgggcgcccacctaaacggtatacctttaacgtgcctttgttccagcacgggtctgtggggggtgagcacccgaaccagcaaacgacggggggccgcgatatcgaggcggctatacttgccggcgcttggtggttcccttggacctcggacaagacgggaggtctttgtggttcatagaaatttcgggactgaggccttaccctgtcctatgtccttgctactggctactctgtactactgcttgctaagcctaccgttctgtgcctatctttacttctgtcgtgcttgcactgccgtccttcaatctggtttgcgtggcgcaatcaagatcttaccacggcgcgttgatcggcggggtttagggtcggcgcgttttgctcggtgcgtcttgctcggcggggataagggtcggcgcgttttgcaaagacggggagctggtcgactcgtcggatgattacgcgtcgagttggactctggcgccctgtatcacagcgcatcaaccgcgtcgacttttcccgtcgatctctgccgcgcatcgccccccatcaatcgcgtcgcgttccactaactgcatcgagttctatcctcgcgtcagtcggctttcatctcggcgcctcctctcaccggcgccgacgtgcccgcttcctcgtggggcactacaccacataaataatgtgtgctaagtagaaaatatctggtgggttggtagagacgaggtggaaagagggtaatccaatagggggcggaaggaaggtgttagtttaatgtggttgattgatatgcgaactagttgtgtggtgtacggaaatgtggtgtgtagagttggattgaagtggttggtttgaggatataatgctgtagacaggctattaagttagaggataggactgggatttgtgttggaaagtgcattttaagttggagagaaggcacatttagttgtatggagcttgcacaaagacaggaagggtggggtgggtaaacagggtgtgtaaaaaaggataggtgtggttggttagtggatgagttggttagtgtgtgtgggtgaaagtggagatgaggagtgaattgaagaatggagagggagtatgtgataatcaaattgggttggttgatgtgtaagttggtgggggtgtggaaatgaggtgcgtgtagaatgttagatgggtttggtttggtggatgtgaggcgggaagtggacgttaaggttgggggggggtattgatgtagatggtggtagtggattgtaggatagatcgaaggaagttgatgtttggatgaaattggttaatagcggaggaagggtagaatgtgtgcataaagtgtaatacatgttgttatggggtgaatatagaatgggggcaagatgatgcgattggagaatgagataggagtggtggtgataagcggagtgtaggatacgaataaggaaggtggtggttggatagatttggttggtgtagataagaaaaaagagcgtgaaaacatatgtgtgaaatagagtatatggggttggttaggggtctgaggttggaagtagaaacattggatatagaatgtgaacgtggattgtggtgagaagtggattgtaggatggaaagaaagagaaattagtgtgtgtgaaattagtagagtaaaaggtaacaactgagagtaattaaaaattatgtaaggttgtaaaaaaagaatgataaaacgaaagttgtaaccggtgagggtggatcgtagggttaaattgaggtagttgatgtggaattaggtatgtggtgcgcgattggggtatgcgaagtaggtttgcgatggtagaatggtggatatgaagtaaaacgtgaataaatgcggttggaaagtgagagtggtggtgacagaaaaggtgggttgtaaactatccaaaattcggcgcagagccccgaatccagaacgttcatgatgacgcaaaggtcagagttcagcattcgagcatacaaagttgagattcgggcgaaagtgcgtaatgtttcacgattttgcggtttttgcggtttttgagcgccggacgagtggtacatatgtatgagcgttagaaaagtagtggtgtacatagaagtactgcatatatgatgctgaggattccgccgcagtcgagggaggcgagggaggcaaaccgacagctagagagtacttttcccgcggaatccgagggaggcgaacgcgaaatccaagggaggcggttcgccgtgattggacaaaatgcgacagaaaacataagaactacacgctctataaggcgccatttacgatccacagtgcgaaatagacgatatttacgccatgtattacacgaacaaacatatggtataccttttgtgcgtatcacagtagcggctatgtgggtgagtggctccttcaagtctcgtgaagccacagtatgcagtgtatacaaacaccatctttacatagacggggtgattcgcggttaggtgtcgcttcgattccccgcaatacgtagatagttttattgccctgacttgcgccaaacgatcaaatattgacttcggtatgcctcctcaaagtgaggcgtacgcaccccccagccgccccaagaacgacgacaacgacgatggaatcatttccgcgccacacggtttctggctatacctttagcgacctcgctagtgtatgtttggcgcgcatgaaaggtcaagctgcgagtcgaatcgctacgcccaccgcacaaactgtgttgattctgctgctcgatcctcggacgaagttgtcggtggggtcgctggtctccccttcgaaggccaatggagcgagctaatgcggctgcgaccagcgaatcggatgcggacaaacagcgggtcttggacgttcttgccgctagtaacaagttgctggttgatgcacaccgcgagatgtattgctcgcggaatgctcgaaagggcggggctgtcgagaacgcgactaccgctgcgtcactatcgaactttgatttaggtccgtctgcagatgatgagaaggtgatctgcggagccccattccggcccacagccgcagccacgccgttgtcgacgattcacgacgaagcggacagtgttttggacgagtggcgtcaatacacggtggactgggttgctacggtagtgttgcactcgacggacgattagaagacgagcgacgacttcacgccactgctaatcgtgcgtcataatggagtcgtttgctggagtgtggaggctgtctgcgagcacgtggacatcctccgttggtttcgtgaggttggcagtgttcgcttcccgtcgatcgctgccctcgctcgcatttggttgggaagggctccctccaacgagtttcaagaacgcgttttctcgaccggtggaatcgtgatgagcaaccggcgcactcggacggacacccatcgcgctgtgatgcaggtcctgcggaagcacaacaggaaggagatcctgtgcatggaggctaacgacagcggaagctcgatgctagactgaggcctactgtcctaacgtcgacggaggcttgacgagattgttggacttcgtggttgtcattttggtggtcgtcaatttaatggtcgacaatagtaataatctgatgatattatactactactgtattagaccagctcgctgactcgagcttattatttcgttattagctttgggagaggacactggatattactatagtagtttggtaaaaaaaatctactatcaatctctgcccatggcaaagcgcctgtgcgtgcagagaaccctagaagagcaagtgagactgctaaagatttggcaacaaaacaagcattggactctcacggaggctgccgccgaactagaggttgacgaggtcacactgcttggctggcgcgacaaactgtcggagccacatcaacgatccgaagcaatttggctgcgtttacaaaaggaaaggggcgaccaccgcaggggcgataaaaacagggccagccctcggtgtggcagtcactgtggctgtcaccaacgcgtgagcgtgaaccgaagtcgaccgagtgtaatgtcgatgaagtagtgcagctgaagcagcctggggagccgcaggagcctcggtcgtcgtagcctgagactccggaggtgctgcaggacctgtatgttgtgcagccgaggcttctgcttcgacgtcggagccaaacatctcttgcatgagggctgcacgatcctccgaggtctccgagctatccgacgaccctccctctggcgagtccccgggaggtaataagccaccggggccagcagcagccctcgttagaggagccgatgtcgagcttctcgaggccgacagaccctcgttgtcaccagcaaaccaacgctaaccaagacttgggacacgatcgacgcagcttcgggaaccgggatggcaggcaaagactcggtggtggtagcaggagcctcggaagaggtgcctccagcctccactgtaccggccggcgcttccgggatctcgccgggctcaagttcaccttacgggacgtcatctggacttccagcgccgccgaacccgaagtcgggagacccctcgtcccgcggaggcggagaccgagctggctgagaaactggagcagcgcccatcaacctagactatagcggcacgtccgagtgctcgtacggaagaggctgggaatccagccggctagtctgaaacgtcgttgagggtcgtggcgccgacggaggcggtgcaagaacctcacccgatgctgaccgagggctagataacccagcggccgctgcagctctggtcgaccgacggtctaccgaaaagcttgggcggagaaggctgagatgccgtgccctcggcggagccgactcggcttgcgaatcgcgcttgcgcttgaacgtcccggtggactcagacgaaccaacagacgccacctccgaagccgcgggagcagatgaaccctcggtgggctcagccatcgacacgtcagccgtcttggactcttgctcggacgaggatttgtcacggcgcggactctccacagtgaccgtcggcggagacagccccaggaggttccagtcgatctcggctgcggagatgccagccgaggctaagaccaaggtatccacgtcgagcccatgggctgccgagtgtcgtcgaagaatggagttcgcccgtcgtaagctgttgctctcgtccgtcaacgctctgatgcgagcagggatgacgtcggctcggtcacggtcggacaactggtctcgtagcttctgcaactgggtgttgtaggtaacgaggcttgccttgatgcgctcgtgaagctgggcgttccgacgaacagcagccgccgcgtctgcttctgcagtttgtgtccggcgatccaacgattgggtaatgtttgcatgctgagagatggctgcgttcgcctccagcaactgctgattggagttcgcgagctcggcacgcatgtcctggagatgctcgagcgcttggttgcagtccgagttggccgtcacgaggaggtagtctgcccgttggcggagacgcatctcctcgtcgagcttgtcttgggtttcgacgagctcctctcgcagccgatcgttgtcgcgacggcgatccaccagctcatccgacttcgcgagaggaagacgtacagggggcacagccgcggccagcacctcaccgacgttagtggcagcttgcaggttgcgagcagggatgactcgagctggaggcaaacgggcaacacccacgacgagacgagcgagttccagcatctgctgctcgcccaagacaaccgctgacggaggaatctcggccgtgccagcaccagctccggcgcgacctcctacagctgcctcgcctccaccccccaccccaccgacgccccgcgagttgccaacgtgccccgaaggcgcgggagttggcgacggtggagcgctggcgcttggtggtggtgtcggcggcgagtcgggagcctcttcaatgcgaactgccggcggaggagtctcggtcgccccagcaccagactcaggactacttagaggggccggtggagggtcgaccgatgtctcggaggcggcaggaaggagctcagggtcacctgcaggcatggccggggctggtggcacagcaccagcggcgataggagtggtggcacgcgccgaacgagcctggcgcgccggacgactacccgaagtgtcggtggcgacatcaacggctccctgagatgatcaagaaaggtatggggttaacaacgaggatccgaatgacagtgaggagcggcaggagtgaggaacgtaccggcccggagcactggagagccggaagagcagcggcagccgcgtcggcgaatgcgcgcgacggaagagccatggagtcgaagaaccgtggacgcctagacgctcaccagcgtgggaggcttgcgtcgaggcgggggcagatgtggtattggaaagtggcagtttccaacgctgttgacccgttagcccgacaattaagttcaatcaagggcaatcaaggcaaggtcaagcgagagacggagatggctgcttctgattggatggtgacattatcctcggtagagtgacaatcagtggccgaagcctcgttgggtcctaatacaacccccaacgaggcttcacggtacccacttttaggtacagatgcatttagttacgtacttgtaataaaaagacagtcttcccccaaaaccaacaagggtaaagtccgacttcggtaagtgtagctagcgtattgtagtgcttggacacgctcggctgtgtgtggatgcctgtcggggagcttattgtgcattgaccgagggtttccttggcagcgccaagagttggggcggccggagaggcaggaacggtattagagtatcgttcggtatatatttgtgggattagagtgtccctgagtgaattaggctacgtaccgtggttttaccttggtccccctgtataaggcctaacacgccggtactcttcctttctgagggactgcagtggggttgcgcgaaagcgctatatagtatcctagccttagctcgtggctagtggtcggcgagtcaagcgtgagtgctgcgtgggcaacgatgccgtgtgtatgatttggcatatgtaggtcctgcttttgggacaggtcctaaatttgagacgatggtggcaaatcggtcctgcttttgggaattcctcctaccgcaaccaagtccagtccaagttggggtgagtaccgggcaccaacccgagggtaattcatcccatttcatttcctagctgcagttaagctcgtccagaccaggaaggccccgcatttcatattactaattaccttttcaccccggttagagtagcctcgggtgggaagtattgatttcagcgctattgtgtgatagtaggtaattggttgtgttagttttcctcagtacttgagggtggtgcgcgtgagccaaagccgaccgggattgaccagtgtcttggcagtgtcctggagtgcggctggagttgactggagtagtgaccaacccattcacggtccgaaataataaggaagggctacgtgtttgtatataactctgtatcggtttgtattgtttggttatctgagggggtcaggcgacgtccaggaaggttacgttctgctctgctacctagcgacctacaattaacaagacaactcgtccacagttgaagagccctggttgggaagacaaacgaactcatagggactgttcacaaggacacacgccaccccggatggagggtacatctaggtgtataatctccggctagggtttattctgggtggaccccattcgggagtctacatccagggcacgctaactatacacctgggtggtcaggcgctcacccgcctcgcctcagtatgttcggcatgtacggaatgtttgccggacaacggtttgacctcggtcggcatggcggcacttagggacagctcattgatagaagttcctggggttgtgaacgaggaagcagaacaggggcagcatggtcagggcgatattagtcagggggcaccaaattcaccgacggtaagttgacctacagtgaaatcacaaccatttgcggctactaatagttctgttttgaaaggtgtgccgacggacatcgaggtgatggagtcaaactcaaacgtctcccttccatgtgaggtcaatgacaatcggagtgcgccacattcaccgacggtaagttaacctatagcgcttgtggcagtcacttcgtttactaaccgttttgtttaaaagggtgcgtcatcggacaaggaagtgctggaaccaagcccgaaagtctcccagccagctcagctcgtcatgggggaggattctgccagcgcacccgctccaaatccaacagcacccgagcgagcagcaaaacgggcaagacggaccccatgaaattcgcttcagctgttaattgaggccgtgcgagtgggagcgccgtacgcggagttcgcctctcgtctgcgcaaactagcagtgcgtcaagttgagccaaaggcgtcactgctctcggttgcatgtaaacccgacaagcccccaacgctgccggtcgaggtcacggaagtgctaccgtcgaagctcctgaaaatgtgcgggacaaaaaatcctacgtttgagtcgaaatggaaaagaactcgtggtcgagccattttgcggcaagacattgtcgtcattgtctgtggaattaagtattctatggaggcatttgatgcgatgaagaattggtatacgattcttcagcgctacgacgaactcgaccgcgctttgaagtgagtagcttgggagaagtacaatgtattttctccagtcgatggctttgaataggagacgcgtatggtcacccaagacatgagtcttcacctgctgcgactgcgtgttctccaggagcactggattttggtcacgttctgtggcaaagagcaactagatgaagcctgcttggacagatcgcttgtctgtttggtcagacaataccgcaagacgaagattgccgttgcagtgcccgcaaatgtaattcgtatgccgcacatggaccttgagctggctcgcggtcagagcgccttcaagtttgccacggctcaggcggtcccacccgccatggtggtcaacgtgaacgcgaacccctggtgcagtgtaatcgtggatctgtccacgtcaacaatcaccgtgttcgattcccagcagtgcggcgaccgccttgttgcactgcacaaactcatccaagacaagatcgagcctttgtttcctccacgtcactatcggaataggacgtacagcacctttgccattcgagataactacaattgcggagttggggtgttggtctttttcgaggagttcctgtctggaaacctggcgcgatgcgtcacaggtagcacacgggacgcaatgcaatacttccgatatagatatctcagtaagatcattgcagggcttactaataagtaaagagctcatcagcaattgctcgatcgaagcttattatcaaacttcaccttaaatcgaaacctacgccttcatgacagcctaagcttccgtttgaactgcactatgatcaccctgacgcgctaccccaattgagtaggccgcactttggtcgtggccgatccttgaccacggacccagagcgtttgccgcccgaagccaacttcaagttgtcgagcgtcctcttgcagatgccgtagacgatccgatcgccgccctcggatgcctccaggtacggacacgagcgagatgcccgacttgcgcctcaccttgaacgttaaggggttctgcgcgtagttgaacgtgtacagcgagtctgttgcggccgtgccagtgctgtcggccacgagcgtgccaaccgctgtcttctcggcgggatcgacctagccgcgacacttggtcaagcgagatgctgcggaagggcctgacatctgcgtgctcacgagtgtcttgtagtggttgtagagcgccttctagttgtccacctgcctccagagcatcacattactcatcgcgcccaccgtgagcgccggcgcgtgcagcgcgtaagagtagaggttcaggccaaaggaggtcgccgtgcatcggcgccgatgtcgctgcctgctgctgttgaatggacagcctatcgattcaactccccacatttctttttcccatccaacaatctatttctcaccaccacccacatgaactctcaccaaccattttttttactttagctttgttcccaccaatcaaccacatatattctatcacacacatcgttttgaaatcctacctttttacacgaaccagctccatccaactcccaccttacttctttctaccttacaatctacttctcttcattgcctacacacacaccaaccaaaacactcacttcccaccacatacccaccaatctaccgcatatatccacctcatttacacattacatactatcttctacaataatccactccactataaataaagaactacaatatacttctaaccatatacttcaacatacctaaatcaaattacatattaatagatattttggattatagtacataatttggtttattatcgactaaaaggtagataatttggtttgttaccactgttacccatcaacttatactaacactatgtatactaccacatattcttcatgtactactatgttcaccacttctcatattctactacacttgtattatatacggatacactggggacccccaaagcgtaaccttcgtatgcccgaaattagcagctatcaaatactacctccggaaggaaaatactgcacctttccaatgaaattacagtctagcaataaacgatacccttgcaaaagcgatgcaggtttgattttcgaatctcccgcctaccggatctcatccgatcctccccctctcgctcccccgcctcccccactttcaaagattcccagtcctcgccaagatggagaccaccgacgacgaacgccaagctgtgtgggagtatctgctgcttcgtagcacaaatggggtactcaagcgcggtgacatcgtcagaactgctgcctactttcgccttacccgcttcaccgtcgctcgtatctgggagcgaggtcgcagctcgatgggctcccgagttgcagctgtcgtcaagtccaggaagagcgcgcgcggaagaaagaagctggatcgtgcgaccctgtgcacgcgcgtggttgaagtccccgtgaacgaccgcgagaaccagcgccgtgtcgcggcggcgtctactgtcaacaagtatcttatccagcggctcctacaggaggggtacttgcgacgtgcgcttcgtcaaacccgtccacggcttacgccgtcgcataagcttgcgcgtttgaagttctgcgtcgagcacgtgaagctgggggccaacgggaaccacttctttgaccccatgtacgacgttgtacacatggacgagaagtggttctacgtgaagaagattgggcagaaggtctatgttctgactgggaaggacgggacgcctgcggaagaacccccccgtgcaatacgtgcacagcaagcgctatatcaagaaagtcatgtttctatgcgctgtagctcggcctcggggcgactgggataggaaagtcggcctctggccggttgtggagacgtacatcacgcaacgggcaagtgtcaaccgcgctgctggtgtcgaggagctacgtccgatctcaatcacctgcgcgatatcgcgccgtatgctggttgacaatgtgatccctgccattaagtcgacgtggccgcaagagcagaaggacattccgatcaaactgcagcaggacaatgcgcgaccacacgttgatgaagacgatcccgaggagctggcagcaggttgcagcaacggctggacaatcaaactggcgaatcagcctgcgcaaagcccccagctcaattgccttgacctaggctactttgccagcatccagtctcttcagtcgcatacgaggctccgaataattgagaatctcatcgacgaagtgacgcgtgcgttcgacaacacaaagaccgagacgctggacaagacgttcctgactctacaaatggtaaagttgcagaccatgaagtgcggcggtcggaatgactttcgcctgaatcacatgcaaaaggacaagctacttgccgctaacaggctgcccgtaacgctgccgtgtgatacccagacgctcatcaacgctcacatggacatgtccacgctatcttcactacaactggtccctacaccccctatgtcactgtttccggcagcactagaacccacagcattgcgttctgcctcacctcattctgatctcgacccctttctttgctagtggtagtgcacactgaaacacaacctttgcatatcttataaccgccaaaaaggacaaggcggagcgctgcgtaattttttttaaaggtgcagtattttccttccggaggtagtaatggatagctgacccgactctggcacattccagtggtatcattggattccccgtatacaaaaacatatacgtccaggttttcacgtcttcgtacccaaaattggctccaatcatatgttggtctatttggcccgtcttggacactaaaccctaaaccctggattttatatttactttcataacttatttatcacatttgggagtttataaattattattagacaaaagtcgctggttttacctccgtttagtaacatgtcacgaaagaggggtacccaaacttattctactgattacctttattaagctaaattgaggcgcaaaggagctggatgaataaaattggcagatgttactgataccgaaaaaaatgccgagtcttaccgcttattatccgaaaaaagctgtacggattgcaaagcctatgctttttgaatggggattcttaccaatcgatcatttaacttacgtattctattttgcccctctatcctttcatatatttgatattatcaaataacacgactgttgaaggttatcgctctaagcacccaaaagaaacttgtgtacattggtgtgttgcgacaggcagcattgtctagactatttttgaatgaatggttctttaataaatagtctgacctagactatattttgctaaggctatttatgaagcaacacacacacaaaagagtcttactcggacttttcatcgaccggcttaccttcgaagtgctcgcagtgtttcgcgataatatcttgaagatgcgggtagacctggccaactgaccaggaaccatcgattccaagtgaaagtccacattgaatcatcgccttacgcgcataggacatcccatttttgtccttttgaaggttgacggctttcaccgcctctgcagccagctggaggacaaactttttccctggattttgtagtttcccagaccatgagccgttcttcctgactttgttttgccaacaattgtccttgatcaattccatcttctactcattccacctcgttttccaggcgtcctttatcttgaaatcacgaaggagtcggctggctgacacaggtcagtggtgttgggcggaaagaatttgagatcagcgttggtgttgtcgagttcggcacggcattcatccgcctcaagatggcctgagctcttattgagatagatcgtttttcaaagtcctctggggttggcacgcatagctcgtttctcttttagatattcacgaaagagcttctgtgtcatccacccttttttgcttgagcgatagcaaacaccaggggtcctgtcggggacgcctcgaattgggtaactcccctcagaattcatgaaagtcatcattggggagggggatgcgtgcgctgggcccacatgacaggctaaccaccatcgtcattccttcaccgccgaaaacgacgtccgcatatttgacctctgtatcaccggaaaatccgagcgtttttccattgtcgaagtccacaacaaagtgggtttcgtcgatattctcaattacgttttcatccagggtgccatcggcgaagccacgttgcaactctccaagatataagcgatcttcttctcaataaacaacgctttcggcccgctaagctgttttcttccggtttgtgttctgagcacgatcacgtaggcctccatgaagcactggacccaacgtgtgttgatcgtctagattatcagcgcgccttttgcgtcgacgttcctagagttgtatgagtcggttccatctcgaataatttgttttgcaagttggcagactggatactttcgaggagtcgagagggagtcctgcaccatactaaaccatgtctaaggacccgcaattggcacttccgacgccgtgcgacaatggattcgcaagccgatcgcaagtttggaccgctgaacccaaggtatactcaagacaagacatttgaccccaagcatagtaaacagaagatatttgcccgaagaagagagagagagagagagagagagagagagagagagagagagagagagagagagagagagagagagagagaaaaagtagctgataaaaaccaaatagagttccttttaccctgtactgcgcaagtgacttcggccaagcctgccgacggaaatccggaggacccgagactacgaccgcgggacgctaagggcacatcaacggcgaaggacagccgtctgtgtgggctccatcaaactcaagtccagttaggtggtgaccagcgacggccttgagcttcctggggtgatccatctattccatatcctagttgggtcacttgctgtgctcgtggtagcccatttcatattattccagagggtattctggggtgcgaggtagtcgcctccagattttgtattgactgcttgtgtgaagggaaggtaactgatagtgattgcattttcctcctttattggaggtggtgcgcgtttgtgtgagtctcaggggagctaggcccctgaatttcagactcgagtgagcctagtgtgtgtgacccaccgtccaagggtccaaaagaataagtgacggctagttgtagtgtttgtatactctgtatttgttggttttatcgagctaggagggcatttgggtaaggtgtcttctgagttccaagtcccagagttgactgaaatcctggaccctgaattcgtgatattctgggtttcaggggatctaattctcttggtttgccttttggtgtggaggtacgttctgaagtagacgtgcgctcccgcacgtcttcgaggctacattttcaaccggtggagtgccgttccgtcgaagacaaacgagccgacagggattacacaaggtacccacgccaaccaaggagtgtgattctcagggtttgaagctttgcggctgcgaatctctgggtctatcttcttgctgttgactctcaagtcgattctctgggtctacccctggggaacagtcttgggctgcgctatcgaacccccctgggcgacaaaggtttcatcggcctcgccccaacactgcactggattgacgccaactagaacctacgatacctcaccatatgattcatacacgtgaaatacccccacaccactgtttggctagctgacatttcattgacgttgtaaaatccatgggtggagcgtttctactcactgtatgggcgatcactaccgacaatgctacgaacaatacaagcgtggcgcggtcaatcaaggcgaaactatctcatgaagttggagagcacgctgaagcgacgatgccgtcatcagctgctgccatgacggcttaaccctattgcgaaccgtcttacatttgtatagcatacaattctctttatatttttttgcaaatgggcgcaccatgcgcctattgacaaaagggaggtactcgcggtattggacctttagtgtgtaagagataggatagtgttatgcggtagttttttgtgtacaatcaaccaaatagacttgactgaagtattggatgatacataaacatgtactttttattggttgttacaaaagacggtatgcaaatgcttacgcaaatcacaaaagggcgcatcatgcgcccattgacagcgattttttcacccaattttgaaaatgatgccgatgggcacatcatgcgccccttggtcgcgatagggttaatcagatgcaatggtctccgagccacatggtgtaattcacgtgtggtgtctcgcgcatgtattgcagttcgctgtgaaagaagacctaaaagagtgctccatcgtagacacgagtataggccatgttcgagatgtactgaagaagatgacggaatcgattgcgctgacagtccacgacacgatcgagagtttttttctaacccctacatgtattggtatcacaaaaaacgcctcgcttttctgattgcgaaaatgtgtgtctcactgtttggtacggcgtcgtttccacagaaacagcagtccaatttcccctgatttatataatagccaccccttaatatgtgcgctgattataaatctgacttgcatttgggccaatcattatcacccatatgatttttctcggccaatgataatgtagtggattagtcgcggagtcatgatcatagataaatgatactttggacggatggtcgttattctcattcttccaccgatagatcgaaagaagacgtacagggctacaaatgtatcgaatcatatttcttagaatcagtgtctagacttacttatggctatctaaaatattagctagtgttgtcatcactagtactgctttcatcgctctcggagctgtccgaatcctcgttttcactgcggctaccataacttttgatctaagcattcagatccaccaagtgggctcttgctttgtcaatgcagccttgaacagttttcgacgacaaagttttgaaagctgtatcaagccgacttctgacctgttggaatgtagtatccttggtgtactggcgctcaacttctccctttacatttgcccacacatactcaatcggctgcaaatcagagtagtgtggaggcgtgaacactactttgtgacccttcttcttcgccatcgtcacaatctctggctctacgtgctcagcagtgtgccgtgacaacttttcccacatgatcgctcttgtatcagattcagcgtaaggcaagccatagaacttagaagcagcctggatgtcggatctccgactcccttttcggggtgtgttgggcggcaacttcttgtgatattttgcgttatccatcccgacgcggcagtggtgcagttggcggtcttccagacaaacgagcagcgtttcaatccaaattttgaagtagtcatgattgaacatcccgtgataatccatattttgcttacctccctcaaaaaatttcagcgtctcccgcaaaaattgtgctttgtcagcgtcagtatgatcggcatccgggaggttacggtctttgtcgataatggcagcgatgaagcaaaatcggcgacccttgtgcttctcctttatcacgttgggtcataaagggagtcattatgactggagtagttgtgatgtatataactttcatcgagataaaccgttcgaacgcgatcggcactttcacaagccatcaactgcacgtagctatcgcgcttagcttcggtttcagctgacaaccgatatgtcgaccctttccgctttcctcgcttgaaaccacatcgttttacgaagcgttggacggtgcggagcgctgaagccgtagcagcaccgtcggtgacgtcggcgactagcaactcttgctgtatgaggtggtacatgacgtccttggctatcgtgcgctcacgaatcgcgctgcgctcacgaataaactcgcgcgcagacttatccatatcaacagtcgtcaatatatgggacggcttctgctcacggttagatggcgccgatgccacgggtagagaccgaaactcgtcaaagtcattccaaatcagacggactgtgttggctgagcgcgacaacagacgtccaactttgactgcgagtggctctttctgacgtaatttcacagcaccagacttcaagttggctgtgacgatgaggacgtcaatacgctccaggagcgtgagagctctgccgcggttatctgttgtgtaagtttgagcttctgcgatgatctccgccttggcgttaggagtctcagttcgcgctcatttggaaggaggcatcttgataccagcgtacttgctttggagcggtaaagtggctcagttgtcatcgaacgacacaacccatatttagcttacggtaaccccgatttatctgacaaacggatactgttagcaatatctattttggcggggtacaagtttatcaagtcaaaatagcctgatatcattggacaatatataggtgtgggtaggtaacgataaatgtgctcttgctgctctgtcgcaagacgccgtctatctatgcgtttccagcatattatacgcagcacaacccaaagcagctctgaaaatttggatcaaattgcatgtaatccggaaaattaatagcagaaacacctctcgatgttgtcgcggtctgtgaagaaggagctgaggagggtatgcaaggtgttgaaggtaacctttcgcaagcctgagctagattgcgttactcgttggaacagcacctgataaatggtgctgtcagcattcacctgcgcaagccgattgaggaactgctccgcagcatccgtgaaggtcacgagggtacacggactacaccatcaacgccggcgaccggcttgctgcttctgtcggagacgaagcctaggcaatgctgaccgagttctgcagcttccttacaccagtcaaaggtacaactaccatgatgtgtggtatagcggtttctgagtctggaggtcggtggcgacaggcggctcggcccaaaacgtgtacatccgtcaccgactcgggagtttcggcaaagtacagatcgcatgatctcaagggtcggcgagcgagtagacttggtttaagtattggaggggctgtaacagcccagttccactactccattgccggttcaaaacggcgctagtccacttaaatttggtattgacaaatttgtaagaaaatccaaacgaaaatttatatttaaattttacaacaggattttcttacgatgcaaagtggtttagtagcagagcaaaatggtgcaaccgcgctgcgaaagaagctcaagtaccgtactgcatgtccttcattcgctcagtagcggccacagcgtgctggcagtgaatggtcatcttgttcaccagacgcaggtccatgcacttgatcgcgcgtctggaagctcgctccagaatctccatccgagctgccgcaagctgtccacgcgggcgagctgcaacaagctcatctcgtgaccacgcaaggtccgccttgatctttcgccttgagcacgctaaagcagcctaagcattggtaacagttaacttaagcgtaacgttaggattaccacgatatccagaaaaaagtgcgtacagacccttaccttcaattgggatgcacattgacgaatacggtgcaaggcgcagaagcaccaggttatcgtgctcagttacaagctcttccgtctgcctatgggcggaagcgctgtccagcacgatgacgaccttcttactaatgaagtgttcgttgtgggtaggacacgcctttaccttctcgtagacctcgtccgcgaaggcagcattctcagccatctgaatgctgccgcgctcaaactggtggtgtaccaagcctacctccgtagacacagcgcactgaatctggaggttagcgcctttggaaggcgggaggaccaccgtggcacgcttgtccttttcacccttccttatgtacgcttgcagtacgcattgaagctcgtctcatcgtaatatacgatgaagtcgcctgtacacatgtgcttgcgcagctcctcggcaaaggttttgcgtttagccttgtccactgcattgttgcacgtctgtggctccacgcgaacctagggcacaagccaaacaatccgtaattaagcaacataaataatattacaacacacatactgcaaagtaacttacctgttcgagcgtgtaaagcttcccagtcagcttatccctgattgggaacgtgctcaggttcacgcggagatccagccaggctatgccttgcagctgcgcgagagggtaggtgcagttctcgtcaatgtactcctcaagcgccgcctcgatgtcgggagtacacttgacgcattgcgctctcacccccccccccccccccccgcgtgggagcgactccacgcgtccgttggccatagaggcgacgtgcagtggtgggcgacatcccgttacgtgcagccaccagtcctcgcccgccttgtaggcggcaaggacgcgagcccgagtttcgggcgtgtgcggggagcagggcatggtgatggagcggggcggcgtttgttatcttttgagcgcagacttgcgaatgaggtcatttgttagtgggtgccttagccgtcaagctaaacgccaaccaccagttcgggttgtgcaaaaaccgctttgctttgcgtattgtttctgagctaaagtttgctaagtaacattattttagtgctatttcacaaattacttttccacactgaagtggagtagcaccatagtggaccggcaaaggtgtagatatttgtataggagccccaatgaagggcctttgagccaacaaatcaaaactaaatatagagtggattttttcaaaatcctaaaatagcggcacgcggcgtctcttcaaggtacgactgcccccgtggggctagatcatgaccaccgctgagatcggctatccgaagtgacgaaagttttctcggtcgccgagagcaagtgcgtatagcggttatctggattccgcccctggtgaagagctcgtcgagcgtacgagcgcgggtttcggcctgctcccgacttagccggtgcggttttgcgtcagcgctccgtaaaaggcgagagccaccgtccatcctttggtggagggcacgggttaagatgagaaggagaaagagaagaagcgacaaggagaggttggcgagagaaggggagcgtgctgtgtgctcgtggcacggctaatggaaggtgcctgcctaggtaaccactgcacagactgggcgatcttcgtatcacccaacaagcctgcgctccctgtagtgtaggtgttgttggtgtgggaatgggaagataacgagtttaggcacgtctgctacaccacatatgtctggaaacaaaaaaaaacaatccaacctttggcatcgctgtggtggtcgtctttacactcatctccaatcacgctaccaaggtggctctcaatgctaactccagcttcaccgcgagtttcgcgacggcgtttaagtcgaaactagacgagtatacggagcatgtaaaaactcgcgaagctccgatagccgctgttttggacccacggaccaagtcacttctcccaagcatagttgacgacacgggtaccatccgatagtacgccttggacgaatatgacgcagtctacaaagcccgattcgaaagcaagcagcgatacccgactcagctagcaggaaaaacgcgacgccgcctggagaggcattttccagctgatcgacggctcgttcgggtctgacgagcctgccaactttgaaagagaatccctcgcgtcagaacgggatcgctgggttgctcatgacgacgaaacaacaaaccccaagacgagccgccacgaaatccgcgcgtggatgagaagcttgcacccgttttcaagctcattactcgattggggttttagccactggccgctacgatgtcggctgcattaccgacattgcaagcagcgacaagaacaatagcaacaaaaagcgaggtgctctccaagtctgtgcgcttcacgggcttgacttgagtcgcgatgggaagaagatgtgtaggaagacggacgctagaacttgttgtcaggaaggcagtaaattgaattatatgttgagatgcatcagtgtaaacctgagagaaagctaacttgaaaatcctctacgacagcagcagaccactacggctcacacggatgtgcgagcgggggcaacaggactcgtcccactagagacacgcatccctctcatactcgtttttcccgcaaagtctcgaccagaacctcccccacagtacacggcgaaacaccgatcacctcctcccgtcaggttcgaactagatgaatcgttgtaccacaagacacttcaatacgtctgacactaatgtcgtattcacggcgactcaatgcgtgcgtggccgcagccaagtactaccgccgtacgacatccgcgtagcaacgaatcggatattgaagaccaaactgacgttttctagtcgccggggacacctccactcccaatccgggttttggtcgactcgatagcaccatcaaagatgtcggtcatggcactgggcgccaccccatctcacaaaatggatgtcggcggtcagggacagcttgtcggtgaccaagttccggtcgctggtgtcacctcctctcctaaaacggttgccagtggttggtaaccaagatcggccatcagtcatgtcccggctggcaaattttgctgttcactcgagtgtccggttgtcatttaaggtggcacagatggagcccgctctaccgtcttcatcgccttgctttgaagacagttttgagccggaccacctggacggcgagtatgaagtcgaggctatccacgatgaccggaccccgttgtcaacgagtactcaccagaccatccgagagttcaaggtgaagtgggtcagctatgacgagccgacatgggaaccggcgtccaatctgtcgtgcggtggcctcctgtatgattacctacgccggaagcgaagcgaccgacatttgcaaatggtccaggtggccgacgtggagtaatcccgcgctccaacgaggattgaaatgctcgcaggggcaatccagcccgcgatgtcagacgaacgaggctactggagatgatgattgaactgcctgcgagggctatccagctcgcagtgacagacgaagaaagttactggaatctgcatgttacgcgttaagtgaacgagtcgcgatggaatggagatatcggaatggagccagggacaacggacgacgcaagcaaacctcagtcaaaccctcaacagacgaaacaagttatgatgaagcgactaggagggcgaccgaggctttgggtgcagcagtcgaagtagagcggccaggtgtcaagatggagacgtcaaccgctcttgcaatgcggccctcaaacacctccgagagtgcgtcagaagcctcactaagaccggtcttatagtgagtaagacgggtcttatggatctgtaagaccggtcttacggatttgcaagacctgtcttagttttcacaagaccggtcttaatcgatggaccaagccaatcactttggccttggagtggacatgctactgagtgggaacgctgcacgaggcgtaagcgacggcgagaagaggtgaaacatgtgctggtgaaggtagtggttgatcgaccgaggcttctggcgcaatagccaagaaggaacgaggccgggcatgcacgctcaagcccgtgactaagtatgcagctgaagatggagtgacccgtgagtggtggagtgcaacggctgcgaaccaagcctcgtttgaggcagccaaagcggtcgagggctgagaagaagctatgggaaccgcgaccgagtattggaggcgatgtacgctgacgcgagagacgattatggaacgaaacgacacttattctgattaagatgaagcctatgtcaccgcctagaaggttacgagcctcggttgaccctggagaagaacaagcaggacggagcggggctgacacggtgcccaacgacgttagatctccgacgcagcctgagccagcacgccaaggttcgactccgtagtggatgccccttcatccgactccttggtctcctcgtcggggctaggagagcgagcttcatgagccgcagcaaactcggcgacccacggggcaacgaccatcgacgtccgcaacgacggctctatcacgaccgacgaagctacagcctccctagtcattcctcgaggaacaaagtcgtactcgattcatcctacccacagcttgttgaccatccgatctcgcaaccgatccgcacggtagctgcgctggttgtgctacttggcccacttattgcgaaacttcacaaccaacgggttgcggtgaccgagtgttggagcgaggttgttaatggatgctttgacggccttcgcccgaatccaatgacgacgctcccacagggccagcccgagatcgcccttctcgttagggtgaaaggaattaccctggaactgcctgctcaggcgaacgaggagttgatgtccggtagcctgccgagaaattgctcgatttggtgggtacccagtcattgatccgggaagagctggcgcagaacttggaaagggtgagcgaggttctctcacttgccgaaggcattgatcccgtccgccgaacacggagcaactaagtcgtcgtcaaaatgagaggcacgctagcgttctggatcaaactcccacactcttgaccgccgggtgacacgaatcccggttcgagaaacagtgacgccaggttgctgagcttgcgcgaccctgccgccgcgtccgaagtcaagacgagtgtcttcggtgaccccacgagccaaacgaaccctcggtcggccttcgaattcgtccactgacttgagtcgtgaaacatgcaccaccaggtagaaccggtatccacttcggtcgggtaattccaactcatacgcaaactcgtcgaccttcttcttctcgcggaacggtccgtgccaccgatgggctagtttcttggtcagtcctggtcgaacccgttccatgtacagccacactctgctcccaggctgcaaagaaagcctcgttctcgtcactgtagctccaccatggtcaggggaactcgatgctcggtcgaccgaggttctattctcgccgacgcctgccgtagctccttctccttccttccaagtgatgcattgtgctcttcagctctccgagcctattccgcggcttggtactccttggccatcctcagggccgtttcctgctgtcggttgacctctcggcgccatgctagcgcgtcagtttgacaaccgaagcctcgtttgagtgacgaggacattgccttgagcgtcgactgtgcatcccacccatgaacgaggtaaaatggagcttccttcctcgtcgtatcacgggagttattgatggcgaagatcagtctttcggcgatctcgtcccaatcctgctgcaatgggtcttcagcgtatacgcggactgactgcatgatcgtcttcatcgatctctcctgctggccgttggcctgcggtcggtagctcacggtcgctctcgaccgagactgcatcatttctgcgaaggcttggaagacctcgctcataaatcgaggatctcggtcatgacggatcaaggacggtgccccaaagcgtcggtagacacactcctcaaaagcttgcgcaacgagtaaggcagtagtttcagacatggctttgcccatcacggatcccgtgaacgagcattggaacagcaggagagccgtgttgccacggcgactcttcggtagcggtatcacgaagtccatagagactagttggaaggacctctcggctagaatgttccctggcgagtacccgcggaactgaggtcggctcttacttgtactgcaatcagggcacgacttaacgtgtttctccacatcggcatactggacgatccagtaatagtctctcgccgctcgatgtagcgtacgggtaataccatgatgactgccttcgagtgagtcatgacagctctgcaggacctcttggatcatcgttgtgggtactacgagtctcatcttcaactcggcttgctcgtcgtcacttgaacgacggctcgttctagtgtaatacagcacatcgtcctcgctcaacacaaattggtccgccattttccttgcatctcgtgctgctctttatccaatcttcgcgtcatctccccggagcactgccttcagattcgaccaccgtaactcttcatcttaagcggtggcaattctcctttggcgttcttcctgtactaccagcgggtcaatgtcttccgcgttcggttgggctggtgacatctcggcgcgtagcggtgaagctcctgcttcattctgaaactcgttcggcacaccattggcttctattcggtgagatgcgtctccctgatcggtgaccgaaacttcatctgcaaaccggacgtgtttctcctttgctctcgcttgtacgtctggtcgtcacagtcacatgtccgggttcagtctcgttctgccgtctgtggtcggtttctcttcgcacaaaatcgaaaaaattcttgctacgaggtttggcagaagctaccacagcccatactgcgttgaccgagggtatgtcctcgacgacgcaaccgtcagcaacctcgatgacttcagcgatacggttcagcttcatcagctctaatactgggtcgtccgacgataccaccgtagccttcttgcactcgagagtttcgcttgccagagagtttgccgcagcgttaaactctctcaccacatgcaggtacttcaccgaccgaagcttggccgtgaggatttggtggtgactgagttgttgcagcaatgactccttccgacaggctatcacccctagggcttcctggatcgcgagcctcgagtcaccaacgacgagtagatcgtcggctccatgctgtaatgcagcagagacgccgttgttcatcccggtgtactcagcgaggttgacagtggtgttctcgaggtaagcgctcgcagcaagcactacaggccactctggcagcttccatagtatccacgagcaactgccatatccaccgttcttctcggtcttcgcagatccgtcaaacgacataacgaagcctcggtaggaccgcggtaggcgtgcgtagagcagatgcgggtccaaacgagcagttgctgaccctcgtatccggggtgtgaccaacgccagtgacttatccaaatcaacgaagttcgtcaagccggcttgaagtagctgggcaaacgaacagtccgtttctttgactcattcgaccaacaggtgccacggcgatagcaagacggcgaactgggtagcccgaccgaacaatgtcttggacttgtggacccagtcgagtgtcgaaaaccgagtgtagacccggattcgctgtccaacgagttgagtaaaacacaccttcagtatcagcagaagcgcgaggacctctttctcggccggatgataattcatctcagcatccttcaaaacacgtccgcagaagcgaacggggtgtagtttgccctcgtgctcatgcatcaacgtggaacttagagaccaatcgttggtgaacaacataacatggacttccttcttccggtcgaagtatcgtagtatcggcgctgccgaaaccttctgttggagcatcgcgaagctgtgcttggccgcggtgaggtcaccccccgggcggaagtcctcgtccttaagctggtacagcgctgctccatagaccgcaaagtcttggataaagcgactgtaatagttgagtgccccaaggaaggactgcattcatttcttcgttgacgggaacggaagctcggtcaccccagccagcatcttatcgtccggtcggataccttctgctgagacttcgtgggacaggaagtctaccttggactgcacaaagatgctcttcgtgatgctgatactaatacggcactcttcaaaccgtgccagcaatcggcctagcgtcgccaagcacgactcgaaagtctcggcaccgaaacagatatcatccacgaatgaccggcgactgaatactggtgtcaacgaggagtcagcgggctccccgttggcgaacatgttggcgatagggctgttgaccagttcggctacagctcccttaccaagcgagttgtctcggtcggcctcgaacttggtccggaatggctttgccgtaccagtcgaagcctcgttcaccccagcatgagcttccttgtcatgttcttcagctagacgcatgcgctccgagaatttaaaccattctcccgtcggttggacgaagccccaaagcgcgttgtcaatcatgcgttgatagatcatcggtgcgttcttcaggccgaaaggcatacgcaaccattcgaagtgccccagtgcgcagacgaaagcagagatcttccgagctcgttcggtcatcataatggcccagaagccgctagcggcgtcaagcgagcaaaaccacaagtacgcctccatgtccgtcagcaagtcatccaccaagggcatggcgtactccataatctcggtgatcgcattaacgagtttgtagtcgatacacaggcggatatccaccccattcttctccaggacgatgacgattggcgacgcccatgggctgtctgagaaggagataagcccggccttcaacagacccttcaccaattcgtacagcttaccgaggaagcgaagcggggtccgccgagccttctgcttgattggcgcgtgcccctgtatattgatgtcacacacgacaccgtaggctggaggcggcagggcgttgccgctcgcaatcaagatcttctcgtggctcttaagcacatcgaccaggtccgtctcctgcttctcactgagctcgtcgttttggacgttctgccctgagtaatccagcgtcgtctccgacgcttcggttaggtccggcaagaacgccagctcttgcgcgtagtcggtaagctcaatctcgttcgtgacgtgcttcgaaacgtcgttcacggtgtcatcaccttcgccagacccttctgcaaccatggcatgcatgaccgagatataggtcgcctccagtagctgcccggggtcatcgatcgcacttacatccgaatcatggaattcagtgtcggcgtcagcggttggggcacccgcgccaggagaagccatacgaacagcgcgtacgggagtacttcgacaacagtagacgcgatggcggtgttgtcgtgcacgctaatcttcacagctactgcaggaacaacatcgcggagtttgctctagaaaaccggagctcgcagtcgacatggattggccgatttctgaagcactacgcgtcggattcacggacaggcaacccgctcgctaggcggcaaatctccgggtacgtccgagtcatccgaagcgatgtcctcgtcgtccaaaccatcgttcgacccaccagcacgttccacatcggttgtatcagctcgagcgacctcgaccgagccttcgctgaccctggggtcgtcgtcgtagtcatatacatcgggttacgagtactcatcatccaatggtgcttgttgacggccgtctggccatggcggggcatccggtggcctcggcaggatctttcgcggcgtagggtaagttcggcgctcgacctcgggcggctgttcagccaaccattgctcgttgcatccatgacggttcttcaaggtcacgcatcatttgattgcagactagcttcgaaccgactcgaatccctgaaaaccaggtgacactcagggtcatcttctgaaatcctgggaattctgaggaatcttggggaactgtggggattcttgggtgttggctcgggaaacacttaagttcagtatagagagtctggatttatggtccaaacccagagaatcatctttggaactctgggtcacctgcactcagggaggtgaactctgggtcatcgtgcggcactctgggtaacaagtctgctgcagtgcagactcgtgtgtatctcctcaaagccacacttttagtgggtttagcggcctcctgcgcatgatcatggtagtagtgggttgattctgagggcaatttgatcctctggggcactcttgagccacagcaagatgaggtgtactctgggatacattctccagagacactttccgccagactttaggcactcatcgtaagggaaagtccgcggctggactgagtgttctctgaaattctgggcgtgcactcccaggattcacacttccagccagttgggcccatctgcgttcagacgctggattcatcccgagaaatcacttctctcccacagtcgccatccatgtcacgcgggtacagccgcgccgtacccaagtcatcctccaatcagcatccgatacaaactccaggtcacagaggtgacggcacatcgtcggcaattttctggggaccgcctcgtgtcagtgtgaccaccatgtagcctttttttgctggggacgtccacaaatctggggtaatacccgtacgacctgcatcaacaccctctaagacgaggcagcgcagaatggccttccgagccaagttcttctccagcttccagcgctaatgtacgtgacttcggaccttctggcggtaaggtaccttgtaggccggcttcagtgttgcgcagaatgcgatgaacttgggctactcgacgagcaaaatggctgagcattcatcacgacccagtcaaccagaactcggtcggcgtcggctttactgaagtcagtcccacactctgtttaactgtcacgccccggggcatggtcttcatcgccattgaggccgttgctgttacgtatgactatttattatatttggccgtacattatgaattgtgtaacagcacataggatctgatcacgggaattgtatgtaataatattttaccctttatatctaaatatcgatttaggctttgtaaaatgtaggcactctaatcttgtctcaaagtccgtccgaggtttgctggccgggacaataaaccgagtacggcgggaaattaaggaaacacccattcagaccaggaatgtggtcgtcccttagttctgaaaataagttttagacaaaagccagacgaaactcggttttcggccatgcgcgcttgtacttctgaccgcttcttgcgggtagctaacagtgtcggacattgcatattgaaaacgtttggtcaaattgctggttcaaatatatttttacgcaaatcctgatctggggtcgtggaataattctatttcgggtccgttaaaaaccggatgcgtttaattattttttgggtcatctagcgccgtttacgatatatttgttgacgggtggaatgcagagtctcagactaggtctgctgttaattggtttcgaattttcctcccgcaataagcccgccttggcgacatgttcacttttgacacaagggcaacaaccgttagttcactgcagcactcgtcacttttcacttcacgcgtgctaaattgatcatagcaccttgctttcttacaagcttactgaggcatttttcatgcgtgtattccaacaaattctggtagataaacattcaacagaaacgggagtgcatacgtatatatagccttactacacgagaaagcggcttgaaaatgcccaacaaaatagttttaacattgggttatttaacagagccaaaacataactagggcttcgcgggggctgagatagcaaaaataaacaaaacagataaacgcacagcgcacacgacttaggcgcgccgcaagcgcggcgcgccagtcgcccgcgctgtgcttttatattatgagcatccacatctaccagataatcagaccttttaagtacaataacacacttacgataatatcaatttgctttcttgcctccgcgctcttttaataaccaaatacaagcaagttataagctgcatcaacgccctcccaagccgacgactattcttaccttcgtgctgtaaattcacccttcgtcttcaggcgtgagaactggaaatgattcgaatgaaacttgatgatgcgattgatgcttcttcattgatagagaccgactagataattattcagattacctattaagtttactttcataatatttcaatatatgatggatacttaaacgcatgcgttacacgcacgccttcatgcgacaccaaattaatcctgtgccggctgcgtagcagcataacttacggtacacttgctatctcagtaatatttcataattgcagccccgaaatcggatgttctcgaaagttctggtttttcctattctcctccctttatcgcagtgatttggattgtttttgggggtaaaaaaaaatctcgccgaaaccgcataaaaataatgggctttttaattgttttaatttgaataataatacggtttttaatttcgtattcgtttttacaattcgtgaagttttgaaatactcgtgaaatgtccgagtgaatgttgcggatccccgtgcgaaacactcggaaaccggcgtaaaaccttgccaatcggcaaggattcgttttgcatactggcccccttacacaagttttcgcgtagtgttcaatgctaggttttcgctaacttttccgacggcccggtccgttccacaattgctcgccgcgcgcggcacgcgaattgacgaactgtcatcccgtcgcgaagatgttgttggttctgggggtgctggcgctggtgctcgtggcggtgacgctgctcgtggggttcgtggccatcacctgggagcacgaagtagtgcagaggtacgacagcgcgctctcgctcctctttcgctgctagcgctctctctaacgcgactttctgtgctgtcagctatgctgccctcccagctcctgccgacctgggcacaaaggagtttcgctggcgctgctggttgtctccatacacgcgtcgaggatggcgcacctccattctgcgtagcgcgtgcccgcgaatcacgctgcagtgcccttttgcgctgctgtcggcggattttgccaagctcgccacctcgctgagtctgccgaagctggcacttgagcagttacccttcatgttcccgcaggtggccgtggggagtttgttcctgcagcttctgggcaactcgaacttcccggctagcgttcgcaatcttcgcctgaaggctctgactgtcgtccagctccgaccgctcgacatgagctttccatctcaagacgaagaggcagcgccaccgccagagctgacggtgcgtagatggctagtgcttgctgcatagctttcctgatctattatccctaacgacgaagcttctggtatctgtttgcagtgcctcatggttctgtctgagaagcgcttcctcgagtcggagatcgagttcgcagttcagacagatttgttcgatgaccaggggacagtatggcagtcggtaacctggttttcgatcccgttcaagcaagaaacgctactggttccgatatcacagtcctcattcactctggacgacaccatcgcggcgcgtgcgagttcgaaccatgcggcagaatccttcaagtgctcctcgaggaacttgtctgaattcgaggatgtcagcgttgtgggtgtggccggtgagtgcccctccaagactggcgcagctcccctgatgtggatgcttgctcgtgctaccggtatgctccagcagaaggcgcgggtgccagcgctgcctctgatgtgcaattgcttgttcagcgaggaacaagctcccgtgcctctgcacaagaaaattgtgctgcaatcgtggacgagcgaggaagagcaggcgcaacctgaagtggttaagtttgctgttgaagcccaagacgcgagcgtcatgaccggcgtcctacgaactgtcggatggaattacgtcgagaattcttaattgttgctgcgccgcagcacctctaccgacggttgatctgggcattccctacggctggatgtgttgcctttaggccagcgctacgtaattcccaataaatgcaaacgcaccaacgaaagatagctcgatcaagacatacgtatataaaatgcaatgccagttgcgatcttctctaaatcttgcggcgcttcttcgcatcgtgcttcagaatcttcttcacgacgcggttctgctggcgttgaatctggcgagccgaaaccagaaccttcgactgcacagacttgctcttcttgatcatcataaagtgcttgaggcgcttcttctctgtgttggttgtaccgccacccgagcgtttgtgcttgaagtcctcacggccttcaagcaccacacgcagccgctcctcttgagtcatgcgcttctttttcgagtagccctccagatcagtcgggttgaccttcgtagcgtctgagcttgccttggctgcatcctcttcagccttgcgcttgctgcgcgacttggggtccttcagggctgcatcgcgctcttttttcagcatctcaatgcgttcgaaatccagcggtgtcaggatacgacgagcatcaaggcgatcctttcgctcaacttcaggggtctcttcgctgttgtcctcgtcctcttcgccgtcattttcatcgtcatcctctccatcatttccacgctcatcgccttcctcatctgatgacacatccacccactcgtcctccgatccgtcttcatccgacgtggacgatgccacttcccagccgtccttgttgtcctcgccgtcgaaacgtccagccgcttcagcctccgccagcagctccgcgccatcaacaccttcgctcgccacaagctcaccgaagcggtgcggcttagcagcagtatcgtggaacttgccgcgatccttgcgcttgagcagcaccgggtgaatgtcgcgaataaggttgagaacaccacgagcagccatgacgatggttttgtcgcgcgcgcggttgtactgcaccaagtcgctgacgagcacatccattccttcacactccagcaaaagcggagcacgacggaacagttcgcgcagggagttgatgccgaccgcaatcacctcggatgaacaccgctccgtgacgaagttgtgcgcgatactctttacaataggcaggagttcctcgggcggaatttcgtcgtggcacgattgcaccaggtaggccaagatagcagtcacgttctgctgatgagactgcaggtagcgctgcagaagcgggtaaaagggaagcaccacgagcttgtggaatcccaggacgcgaccaataaagttcatcatgagcagcttcacctcgaagcgctccgtgcaactcttgaggagcttcagctggcgctcagcaacgccctgcggatcattcagcaactcgatggcagggaacgtagccatgaaatcgagttcgcgcttgcgggctctcttgttcttgctcagtgcctgcagggtatcacgctgacgctttttcgttttcttcgagtgagcgtggaagtccacagtcacaagcgccttcttctctttcttttgctgttcctcgtcttccagaatgtcttcatcgatacccaagaagaagctgagcgccatcaccagcagcttggtgttcttactcgtgcacgcagtggcaatcacattcacactgcgctggtcatgccagatctttcgcttgaagagatccatcagcacctgcagcgacttgatggccgcgtgctcgctctcgtcctgcagcatttcaaacaggaaattctgcagcgccttgttcaccttcacgttgcgcgacgtggcgttgagctggcggatgtccgacacaatgtgtttgtacagaagctcacgcagcctcttgtcggggcagcgaaagagctcaaagaagagcttcaggagggtgatggcgtccacgaggccgcggttgcgcaggagcatgaggctctgcaccagcgtcttgcgaagctccggctcgagcacgaggtagttgtcgcgcagcagcgccatgacctgctcgggcaaggccgccatctccacggggtagcacttggccacatgactcaggaagctcacgagcgcgccgaagtgcgccgactccttggtgggctgcagcaggaacagctgatactcgctctcgaagtggcgcagctgcatgaggaactcggtgcggtagcccaccgggtcgcgcttcaccatgttctgcagctgcggcagcttgccgatcacatccggtcgggacgcgttgacggcctccatggtactcggctacttcggagagaggtcgatgcaacgcggcggcgaacgaagaaccggagtgctggccgtactcggtctgcgccggttgatgttgtcggcgcctccacccattcgccaacagcgaagcatgacttgattttagtatagctactaatctgaattcaattttcaatcgcactttagtgactatctgacgttcaagactggcaaaaatgaagcaggagcacgaggccgcgttccgcctccgtgacggtgcctgcgttcgcgtcgtgcaagacaccaccaaggtcgatggtttgggcggtgaagtttgggctggagcgctcgtcctgtgcgaattcctggaggagcacgcgcaggaggtcgtgcaaggccgcgacgtgatcgagctgggtgcgggctgcggactctgtgggctcgtggctgcctcgcttagcgccaacgcaaccgtgttgacggacgaatacccggatctgttggcaagaaatatcgccaagaactgccacctctgggctgagcgcgaggcggacaacgtagtctcgagcggggagctggagtggggcgtcccagagtccatcgcgccgtttgcccgcaagttcgacacgatgctaggcagcgagatcacccagttgggtcgaggcttgcacgttccgctgcttgagacgatccgctccgtgctacgccccggagtcaagtcgctggcgctcctctccatggatccgtgtcgagctacctgtgagggggcctgcgacgtaagtaagtgcaccgcgtctcacttcgtagctgcagcaaagcagaccggtttcacagtgcgcaagcacccatccgtccgcctggcctctcgcgaagcagtaacttccctagtcggtgccctgggccggccgctgcacgtcgatgaggacgactggagtgtcgtcttcgagctgcgttttgaaggcaccttttgacatggctacattgggcactacactctagttcaactaaggccaaaagaatatagaagagaacaacatctgaagtcgcgccagccatgccgcctctcgtggtgattcgcagcgggtgcaagcacatcgagtattaatacctggagaaccgcgcaccgcgtctggatgacgtcgcggacgaacagggtgacgacgacgcgctgctgcgtcaggccgaagaaacctggcgccactccagcggcaactgcagcgagagcaaagctctcggtttctcgtgcgagcttttcgacgtggagggtatgcatgccttccgctgccctgactgcggcaacgtggtggctgaccgcgacgacgtcgtgtccaagacgttctttggtcgcactgggaaggcgttcctcatgaacaacatgtataacgtccgagttggcccagcgaggaaccgctatctcatgacagggatgcacctgatcgcggacgtgcagtgccaatgcggcttcgtgttgggctggaaatatgtacgtcgcggtctactacttggacgcactgcttactcttcgttctcgggtggggcatgtccattgttcagatcaaagcgatggagagctcccaaaagtacaaggaaggtaagttcatcatggagcacgcagtcgtccaagacgactcggaagagcaggcgtggaatcggctgtaaggaggcgattgggtacggtaattgcagtgtggagcaacggcaaagagtgttgcgagagtgtggtggggagcaagacaaaacttaccattgggcacgagggggatttccagcacgcgcaagaaaagcaaatactataacttatatgtcacgtatatctctcttcttcagcggtccaacgcagcttcactccatcagatggagtccatcgctctgctcgtgcccatgcttcagctctacgatacgcgatccttgtagttactggccaggcgggccgcgcatgcctggcggcgggcctcgcatgcccggcgggggcatcattcccatgccgggcgggggtcccattcccatgccgggcggcgggcccattcccggaggcggcatgcccatgccaggcatcggtcgaggaggaggcatcatgccgccggggggtcccggaattccgcgaccacggccgtacgcctgcggttgtgccattgccgccactacaacagaatgcacacgccataagagcacaaattagacctccgtcgcggctacaggtatcaggcgcttgagggctgctcgctcgcgggctgggttgggttgggtccatcatactaagatcgtaggcagtagtttcctatgttggtgctcagccgggttcggaggaaaagccgtacgcccgatcacttatctgttcgagtgatcacttggagccaaccgtaggcaacggcatcaccgccgcgagcagtcccatcgcaacaccataaagccacatgatccaataccgtaccttgtcctggctgcatcatgcccggggccgggcctccaattccgcgcataggcgccataagtcccatgggaggtgcgccaacaggagctgcagggataccgcgtcctgccgcgcgcgccacgccggggccgctcgggccgacagtctcgttctccttggcgagcggaggtccctccacggtgagcgacacgacgctctcgccacgcagcagcacgagtcccaggtggcgcttctccacgcgctcctccgacaccgccgacttgaccttggccttgagagtgcggaactcctcgcagtcgcccagcaccaggttcatgtgcttgtcgaaggccatgaagtagccgatgagcacgcgcgagtcctgcagcgtcaccttcatgcggtagttgatgtagttgagcatcttgctgctcttggtcatcaccatggttgcctcgccagcgtcggtcgacggatcgaccaagtgagcgccggagacgaagagcagatacggcgagagcttttcctgccgactttgttactggcgggagccgcgccactcctcagacccatgtttatgcatatcttatgacagatcaaagcgccaaaacaagttcaatgcgcttttgatgatgaagcatgcacttccgaattccgcacggttgacgcaagtcgcgatggcgccgcaacaagctacagaagcgttcccagctgcaggcgcctgcgctgagctgctcctggcggagaacaaggacgcagtctacgagagcgagctcaagaacctgctgcgtgaggtgctcgagcgtggctgcggggcccacctcctgtcgcagctgctgccggagctggcggcgctgtcgtctctgctgtatcacgcactgtccatcggcctacaccaaccaggtcagacgctaggcgaggagttctgcgatgtcatccgcgtcaccaagtcgggggtgaagtcccccgtggagcctgtgcgactacggcggcatgctttgtggctcgcgtgcttggttgtaccgcgctatctgacggcgcgatcgcagagcggctggaaaaatctgagccagcttacgcgcacaccacgggagcgcatggagcagcagcttcggctgcgtcgagaagctgcggcggcagcagcggacagcacggagctaccttcggagagccgcctggcagtgttgaagccgcagcggttgcttcaacagctggatctagctgtgtcgaagctcaaggcgatgacggcgtggctcgaaaatgatgtgttcccggcttcctacgaattcagtatggcatgtgtgcagcagtggggagcacacgcgcacctcgcagcgttttacgtgttcgcgcgctacttggacctggctaagcgaattgccaatatccagtatattttcgtgcgaaaagacttgatgccgggcatgaatttgtccttgctgggctatgtgatgtcgctgcgacttctcgctacagccgtggttgagctcaagcgcgtgcggggccacttcaagctggagcagaagcagcgccaacaagaggccagggcaccagcaggcagttctgagaagccatttcctcactcggacagagtacccacgtctctttcatttgtgagtacgagcactggatcctcgccggaatcggaacgtacgagtggtggaggtcgccggcaatcccgtcgtaaatgcgcgctttgtctgggtgagcgagtatcccccgctgccaccccttgtggtcatgttttctgctgggagtgcatcgtgggttggtgccagaagaacaaagctgagtgcccgctttgccgccaagagactcaccctcagcagattaagtgtgtttataactacgtttgatctacacggtggtgcccttgaataaaaacacatcaatgcagtatcgatttctccgttataagagcgatgcgggtagccgacaacatctaatgtttccgctggcgcttgtttttcttgcccgagcccttggacgcagcccgcttccccttgctctcagtcttggcgctcgtctttgacttgtcgtcatccttgctatcagcttcttccttcttggccttcacagcgtcgacatacacttggtcggagctgagagcgttgtgaatgaatcgcttggacgcgtccttgtctagcactagctttgggcccttcgccagctcctccgcgtctttaatcttcttgatgaaagccttcacacgatcctaaaaatcgtttattagcgacggtggtgcgccgatgcagtacatattagcaacctcgacacttttgatggttaagtgcttgacggactacgcaccagttcctgcttgacgtgggtctgtcggatgtccttgggagaaactccctgggtcttcaagaacacgaacagtagcgcgttgatggtgtaagctggtagagcgcaaaatggaaggaagcacacgaaacaaatagcagggtaagtcgacaattcctgaccaacaaactgcgatggagacgcatattacatacccaatgaaacctgcaccttcgcacgctccagtgggcttagcggtgcaacaaattcctccattgagttctgcttaaacaccgccaggtgctcttccaccgcagcgagcgtctgctccacgctggaaaaggcttcgaccgcttgctcgctcatcccggttgctttttgtttgttggggcagtattggttggaagataatggcgtgtggaccacaccagacaatatttttcggatggctacactaactgtcaatggtggctccttccttcttactactactagtactagtacacgccattccttccacaatgcggcaaaacctgcacatccaactgcatttaatactacgcgtatacctcagcctagctaaatcctaccctcaagacaagcaaaattatagctgaacatgaattatggatagcacactgctttacaagacaaatccgtcctggtttccaccgttggcatcagtattgccgttgctgttcgcgctactatcactgctgtcgtgcgtgttcaggtctttcttgcgtcttttcatgaccacttcgacggcgtgcgagaaggctgaagcgggcgcttgcccattcgggttgctggcttgcagcgtgtcgatcagatccttttgtacgtcgatcatctcacccattttacctaccagttcctggaaccgctggtccatcagcgcaataaactgcatcagtaacacgcttgttggatcgacagctcctgctgcggtctccatggccgatgccggacgcttgcttccgctggtttgctcggctgacaacgacgtatgtgggtccgcaatgccgccggtgccagccgcactcgtagcagcattcgggtcttcgccgttcttggatatcggcgtttctgcgagcgcctggtgggactgcaccggggggagcttccgtggtgcctgagcagtctgaatgtcctcgtgcgccgcattagaagtggaggagacaacatggatgctcgtagtctccacacggggaatctcctcaaccgtagtcggtggcagcatggttgcgggggcgagttcggcttttgcatcggttcgagcgttgtcctccctcgcgacttcgtactgccgcctgtgctccaccgagtagacctcgccctccctcaggtgcgccttggtgaaatgcatcttgaacttctgcgtgcgcatgggcttgttgcaatccgggtacgtgcaaatgatgccgttcttgtgcttgttgcccaccatgatactcagatgcgtcggggcggcggcaccttgcgcgaggcgaatcgggaaaacttggtgatgtgaaccacttactcaggagtccctctagtagagcacacattcccataaaggagcaatacattgagcaaatcaaaagaaggctttttcgaattgcttgttctgacctgaacactcaggtgccgacgccccgagaagcgggggcaaatcctttctcccgttagaccgcccggaagctcaacatggtacataacgctcttactgatggctacatccccaatggctcattggtgccttggtcgtcgcaagcggcagtcgaggacgacgaagaggattggtcgtaagattcattaacgctctgtatctgtctgcctctctatttcgcaatgcagcacccgcgtgacgacgagcgcggcaagatggaggcgctgctgcaccagatcgtgctggaggagcagcagaagatggtccagctcggcttcgtggagacctgcatcccgtccccggacagccccgcgcgctccagtattttcatgagtgcgaactggcacatctgccgccggttgctgctcgtgatcgtgagcggcaacggcatccagccaggcatctggagccgctcgctcgtgctggaggccgcggagaaccccaaccagtaccgctcgggctccatgctgccctacctgcacacggcgctgtcgaagggctacggagtcgtggtcatgaaccccagcaccaacacagtgagcgtgggtagcgagaagattccgatcccgtactcgagcacgccagagctgcatgtgcgctacgtgtgggagacgtacggagtccgcgcctcgtgttcgcaggtgtacatcgctgcgtacgggcgcggaggctcgttgacgaagcacttggtatgcacgcagccggtgctcaggtctaagttggcggctatcgcattcattgagtccagccatcgcatcgaaacagacgacacgcaggaagtgagagggctgttgggaacgagagcgatcaattggcagcgatcgaaggaaagccctggaacgcagctgcaggattgcacgcagctagggtgcttgagtctatcagcgggggaacctacttcgccggcggagcagaagtcatcgaacacggcgtggacgattgcggcgagtatggataccgtcttcgccttcttcgacagcgcgcgaggctctatgccggatgaaccggcagaggatgagctgatggatgaaatgagccgcctatcgcaatatgcgtacgctggcgcggcggcgatgtcgtccgcacctcaccagcgagagcatttggaggacgccgagtttcaggaagaggaggtcacaacgagcgacgggaatcatttggggagtcgttcgaacagcgcgcgcagctcaagacgcagcatggttatttcgacgtccatgagcgtgaacgatttcgacttgctctcggtggtgggaaaaggcgcgtacggcaaagtctttcttgccaagaagaaacacggacggaatgcaggtcgagtctacgcgatgaaagtgctgcgcaagcaggatgtattcaagaagaaacaggtcgagcacaccaagtccgagcagcgtattctgaagcatgtggaacacccgttcgtggtgcggctgcggtatgctttccagaaccaccagaagctgtatctggttatggactactactctggcgggtcgctgttcgtgcatctacggaaggagaagcgcttcaccgagcaaagggcatgcttctacgcggcggaattgctgctgtcgcttgcgcacttgcacaacatgcacatcatgtaccgtgacctgaagctggaaaacattcttatggataacgagggacatgtggcgatcacagacttcggcttatcaaaggaggatgacgaaggctcgacgttcgtaggtacacccgaatacctggcgccagaactgttgtgcagccagcgcacagcaacgtcctacggcaacacaatcgactggtggagctatggcgtgctggtttacgagatgattcaaggacacacaccattttgggacaagaatcgccgtcaaatgttccagaatatcctgagcaaggagccaacgtacccaaccgagcacttttcacctactgctacggattttctgcagcgactacttgtcaagaacccgcgtcagcgcatgggctgcggggctgatggcgcactggagatcatgggacacccatggtttgaaggagtggactgggacgcgcttcttaaccgccgagtggacccaccattcaagcccgtgacgaaagatatccacggcaatcgggcacggagtagcagcgctgcgctcaacgcgaacctgcagtacgtaccgaacatcttcaagcaacaggaggttgcggactcgcctgtcgtgagcgtgctgggatcttctaccggatcgggagtcatggccatgcacttcgacgacttcagttatatgggcagcgacatcatcggctcgcggcgcacatccgtcttccgcgacagcgacataaagatggagcttggcgagtaggagccacgtgagattcaaccattcggaagttgaaattgctccagtacgagctcttatccgccacacgtagctgtttcgcagaggcggagactcacggcaatacgcacggtcaagctacagtatgccagaggctcgtgctgagccagagcggataccatccagtctaattgtgcagcattttttcggtacgtatgctttgcatcaatagttcaaaacgctaagagtaaagtaagcaagactgacaggagactcgacgcgaagagttgctgcgtgaacgttttccgagcttcgactcttaagccacaatccattctgtgttgactacgacttgcataccgtcgttatcagtgcttgtttcgcggtgcagagcacgtagggaacaatgggacaaactatttgcaacagagtggagattctcgattttttctagctgtaggaagctcagctcccatcaagaaccacgagcaaggtgcttacggcacaacatcgagtcccatggacttggccgatccgataagcgtcttgcagatggacttgaggtcaatgtagtccaccatttcgtcctgctgcttcaccttagcgatctcatagatctgacgcagatgcaccgagcccaccacctgctggccgggagtcgaagatcccgacgtgataccggccgccttcttgaggaaccacgaggccggcggtgtcttggtggcgaacgtgaacgtgcggtccgtgtaggccgtgagcaccacgggcacggggatgttctccgtcatcttggacgtgcgctcgttgaaggccttgcagaactccatcatgttgacacccagaggacccagagcctgaccgatagcaggcgacgggctggccttgcccgccagcacacgaagtcggaccacgcccttgactgcgacagacataatgcgttcctgataactcgacggggggagagcggacggaggtgaaacctgtatgaggatggagaggggaagaagggttaaatgacgcacataattcgaggtaaaggtgcgcgctgtgagcggagctgtagcaacgcgaaggtaggcggcgggcgcatgggacgcacctgaagcgcaggttgcgagactttgagtggccgccgcacattttttgaagggctactattgaggtgatgggtggagagatttgattggctatagatgtgtatactgtataaactatacggtatacctaacttcaacactttcggtgttcatctcggtagtcttcctagctgaagtagctcggcgcgatggcaacatcttcaatcacgtcaagctgcgcgcgcgagaacttggtcttcgtctcgatccagttgtcctgatgcgtgcgcttgaattccagcagcgtctccttcacctccttctccaaaaacgagattgtgttcgaggacctcttcatgtacaggaaccggcccagctcttcaaaaatcggcggcacgaagcttggcacgtcgtgcgggaacgcgaggacgacagcgctcagactcagcacgctctcggtcatcttcgcttcaagcgccttcagccgctcctgagtcttcttcagctcctcatcgggggcgccttccgcttccaggcgttcacaccggcgtttcagctttgggaatttcacccgcgcctgccccgcgctctcggtcaatcgcacactcatcgtctccactgtcgttggcagctcattgtgaagaataccgcgcagcgcatacttcgccattgcctgcacctctcgctgctcgtccgtcaagaacgcgcagacaaatgcgtgcacctgctccttcaagtcgctcgaaaagaatacccaatggtagaaagcgaacgtcatggtaaagcgcagaacggcaccgcgggtcttccaggtccgagaggtcgacaagcgctttagcagctccagcaattgcggcactgcacgttttccggatgcatcctgcggcacaaaatacattcgcagcgatagtgatacggcatcggtgacattcttcgcttgaacagccacctccgccttcgggtgactttgtgccagcagagcaacaggcagcaagtcatcaagcatgacaagcatatcccttccatctccatacttctcacaacacgccagccactgcatcgcggtttccttcgcatgcaagaatatgtcggtcgctgcgttactttcctccgacacgctctccgcgttgtcgacattttcttctgacgcactagcagccaatagttctctcagtggcaacgacgccgaggagattggagctgagggcgaatcggcttggcaagaagataccgaaagggtgtaagcacccaccaaaaatagcatcttcccggcgcgatctcgaatgatcttgtaatggtgagccaaggcatgctctcgaaccaccttcaccactcgttcgctgaaattggaggcaagcgcgtgcactgtttcgtcagttgtcaaaatattggccgcaagtagatgaacccccaacgcttctaccagagccagccacttcgcttgacgcgcgtagtcttctgcagctgcccgagcaaaagagtcttctagctcgagaagcaaataactcaccaacggctccaatcggcgcaacttcacggcatcagacctcgatgggcgggacgcaagatagactacctcaacccactgatccaccatcacaatactcacatgcggaataactgccttgaacagactgactacactggtgacatgataagccacgtcttcctcaccgtcagtcttcagttttgctagggcgtgaagtaggccagctgtacagtcagccagtgttttcagcgccgcctgccgatcctcctccccaacatcgacgccaacgtttttacttaccaggtcgcgaagtatttccaccactccgctgttcaaaaatgccttcgaatttccgtgtacaagcttctctaccaactcgacgctggccaaattcacgcctgtgaacgtgttgcgtgcttggttaaggagacgcacagacgacaagggtggggctttcgggaatgtctgtgcgctgttcgaaatgtaccgaacaacctcgtttacaccaaacgaccagtcacttggagctgagtcggcatgctgaccatccgcagaggcagcaaatctgttggagtttttgtggttgtttatcaaagcttccacaagcgcttgcgtcgtactgccggagtaaataagtccatcaatctcgtccacgtaaggtgagtcccgttcttctcggctgcgcttcaatagcttcatcaagtgcttgaagagttccaatgcaatctgccgcacgggaagcacatcgttcctcaactgctgaattaccaactcccagacgccaacatcaattggcatcgcttcaggctgcaaaaagggatacaacatcactaagtgcagcaattggaacttccaatgctctgagcttgaaggctctgcttcaagaacggtctgaagcaagggttggttcgtcttctggccccgaatgtatctccagtttagcaacagagaaaggaagaatgcctgcagcttcatctcgaccttcgacttatccgcttcactgtcaacctgcttgacaaccgcactgttgcttcgtagaagcaccaccagcacacgtttaagcaacgtatcgcgcttcttccacaagtttttccgagcgaggggcaatgacagcatgtgcatcaatcctgacacgcgttcttctgttaactgtgacggaccacaaaagccttccaattcttcaatctgtgccaactgacgggagtatatccatctagcgtacagcactgagcattccttcattactgccgctgcatctgaacgaacggattcaaacggattcttcagaagacgctcgacctccgctaagagcgcctcgtagcgctggcgtgtttcttcatcactctcaggctgcgctattgcgttagccaacgcaaagtgttgttgcacttttcgcttcgcatagaaaaacatcactttctcaaccagctcgttgcgtgataaaagcagcacttgctcacccttattctcgcggcggcgaaggtagccgcttgtccgataggcatgcgaaacgacatccgtgctcgtaattcgggaatacatgttttgagattctttcaccctgaaatcatcaagatgctcgcctctccaaattaaaagctggtgcataatgtccaacagcaaacgccatacttggttttccatcgcgctcccgctgcctctctctctccaaaacacgacagcatcgtggatttggttcatcagcaaccccttcagagacgaaattctttcaaatagctccggattattctggagtgccttgagcagtagaggcttagcaccatccaaaaacgccccattcgccgcagtactctcgtcagtcagcacatttgcagccccaagaagcccttggagcacttggtccagaagacgcgtccacacacgaactgttagatcttgactatgcctcatttgttccaacttctcaagagctccaacgacgtggtcttgcaacagattagatccgaatgcaagctctccttcactcggctcgtgccaccgtaccgatagcctattccacgaaatgccagcacccaagtattgaaatgccccgctgttgctagatgtcgcgttttcccactcggtaccaggcaacgatcgaaagtcgtgtgtgtatactccacagagaccagacagcaagttctggaggacagcaccagcagcttcgtaaactttcttctcttcatcgccgttcaaaaagtgcgccaagatcaacttcagctcgtgctcgtagcgcagcaaaatggggtcacctggagggctgaaccgcacaaggccatcgagaatgcgaaggtaccacactttctcattcaccatcaggttggaatcgtgaatagccgtcttcgtcacgtgaagtttgtccagtacaatcggcatgaactgttccaaggcttcggaaggatttccttgcatgcagttgaagatcaacgtcgagatgacttttcctccaaaaggcgaagtgtagaatgcgtttgtcacaaaggccacggtcttgcgaaggcactgcgtgtaaatttctggagacatctgtgcatacaggatggccagcagatttaagacctgcaacacgatcgcatcttcgctcccatctctctttgaagacttagtgctccggtttctgtcagcaatggcggcaggcgaggcagatctagcaccagaccgcgactgaatgaattggaagcaacgatccaaaacagcaaacgcccactcctctaaaacgggtccggcttcccacatgttttcgtcgatctggctgtccattgctgcaacttcagcgaacagactactttccatatccgcaaagagctggttcgacaactctttcctctgttttgttgcctggaagttcccctttgctggatcgttcaccaggggcagccacgatagcaggtgaaagtagagctggacagtcgactgcgttttcttttcatcgttcgcatcaatccctggtaacgtgagcttcagcataggttccaaataagtcgcgaaaaacaggcccgtactttgcgggtgtcgtccacacatcaaatgatacaaaaacaccgccatcgaggaaatcgcagtggccgccaagtgtgagtggctcatggccatcggatcaagcgccttgagcatctcctccatcacgggagctgcacatcgcacagggtggatgcacaggaggttcttcatcacgtacatacacttggtcgctacacctttgttcttcgagtaaatccccagtaagcaaatttccataagcgtgtccaggatatttccaatcgaagccgtttgaagaactttgatccccgccttctcgcgcccaagacgtctgcacaacgcgttgctgagatagtacaagtaggtggcgagtgaattaccgacgttggcaacatttgctgggtggaaaaatgacttcaccatgctcagaatctccaacaggtatcgcgtcggggctgcagcattgccgtcaccccctccctcacgtaagaggtacacgcacaaacgcatggcgtgctgaccgaagcgcttcgacccgtttatcgaggtatacgccgatggccacagctgctttttgaatggggaacccaggtcagaaggcaattccaacaagtcgttcaccttcgcgaagataaacgggagatactcatccaacatcgatgtgctggggtagcgtttggtagcacgagataagattttcatccaatgtccatcccactcgttacaacgcgaaatcaacgaccacgtcgagaaccactcggggaggaggctcacaacagccgcctctgttttcgaatcttccgacttcggcaatgagaccaaaaacgagaaaagtgccagcgcacgaaagcattccgtcgacttgacatttttcacagtcgcgccgaactccgtccacagctcgagcacaaaaggcgtggcaggatctgatgctcggaaaaagctgcgcgcctcctccgcgcacttgaccgtcgtgtttgttaacttaaccatgtaactctgcgacgcctgctggatgtacccaggcgctcgaaagcagacgcgctcgatcgcacgcctcaccgacctccaattgatcacgaggtcttcggtaacagcaccatcttcgccgcggtggcgcttcttccacttcttcagcagcagttgcagcgccgtcacggctcggatttccatgtccacgtcagcgaatgcgcgtccatcgcgcgtccacagcagctccaccaacacgcgaatcagttgcgcgtgcagccccaggggcagctcgtgtttcagcttgtaaaacgtgtccacatcccggaagtggcggttttgcagcacaccacccagcgcgtcgccgtcgcccagcgtctgcatacaggttagtgtttcctgcaagagcaaagatgttcagtccgactgcacgctagagtatagtttttctctgcaccccccgaggcgcgactaacctggatccggcgcagaaaatcagctcgctctgcctggatgctctcgggcgtcacgtaagacggcagcaggctgtagtacgggtgcacgggcgcgacctccgcctcgaccggcgactccgtacaagtcgcggccatggcggcagatcgagaatggcagcgaaagtggatcgagatgccattttcaaccaatcacgcgcttgattgcttcgcagcatgcattccagcacaaaatgcgtgtttcgagtgcttctcgaacgtgctgtgggtcctcacatggccacaacgctacgccggcaaggattacgtatcttcatccacagcaatattaattccaaagctaccacagacgaagttgttatcacaaacggcaaaaaatgctgatcggccacttcaactttcaccttgcggacttcttcaacttcgagatacgcttttgactcgaaagttttgcggaactgtatgcaagtatctagcacgctatttgctccggaatgtaaatgtctccgtgcaagaccttgccgtccctgttcgtgcagcacattgataccctctgttcggcggttcggcaaccttgcgcaagtactcctggtagcgcaaaatgccacgaaacctcagcatagcggtgcaggctactacaagtcacggctagttcaagcagggagtctgcggggctccgctggagctccacgacctagcgtccaccccacaaggaagcaaggtgaagcggttcctgacacatctagtttggctgaaatgtgccttttccggtgaccggatctggacgctctcgccgaaaatgcgtggcgccaagttattcttgcgctgagtgcagctcacttgccctgcgacggagtcgcacggacgacactagccacgcgcagcttgcttgcgggcgcgtgccgccggcatccatgcgatggaaacggcgaggtggccaggaacgcggacccattttgcgtgaaaaggggcagtgcatccattgcttcgcgctttgggctccctaaaatgggattttggggtgggtgacgtcaatcaagcagcctatgcctatgccggccgcccatccgaactctgactctcgccactatcgatttcccagtgcgagcttcgagacgacgacgatggctgcgccgagggtgaagatgccgctgctgctgctggcgctggcggcgatgcttctgctgtcgcacgcggcggccgagagcttggagtcgaccatgggcatcatcaacaccaagcgctccgtgaagctggacccgagcgtgcaacacattccgctggacccagcgcaggcgcagctgcggccgccgccggcgcagatccccgcgtccttcgacatcttcgttggcctctcggtcttccgcgacggctaccgctgcggcaagaccatcttcacgggcctcaagcgcgccaagtacccggagcggctcttcttcggcgtcgtggaccaggtcaacgatggcgacgagcgttgcctcgacgagtactgcaagatggcggaggccgagtggccggacaagggcccgtgcccgtacaaggaccacatccgcgtggacgtgcactcggcctccgagtcgcggggccccacgcttgcgcgccaccagcagcagaagctcattcagcaggaggaattctgtctgcagctcgatggccacagcatcttcacgaacctttgggacgagaacctcttggccgagtggaagcgcgtcaacaatgagatggccgtgctctccacgtacttgcaccacatccacgacttcgtcaaggagaacggcgacaacgcgctctcggcctccttgccgcacctgtgctcgaccatgcgtggctccaacggcctagtgcgcactgtcggcgccagtatgatcagtgggtctaagttcccgcaactcgaggcgctttggggcgctggtctgtctttcaacaagtgccacgcggagcgccgtgtgcccgtggactcgcacacgctctggatgtttgacggcgaggagttcctgcgtgcgactcgcctgtggactagtggctacgacatgtattctcctagcgtattggggtctgttatctaccacaattactccaaggtgccggctcgcttcgagcacatcacggtggacccgcaggtgaagaagcgcgagagcgaaatggccatcaaccgcttcaaccatatggttggtaagccagtcaagggccttgtcgacacctacgagttggacaagtatggatttggctcggtgcgctcgtttgagtcgtacttgaagttttctggcgttaccttcaaggaaggtgtgaacgacaccgagtcgtgtgaacagctccactgggtgccgtacgaaaatgcgacagaagttgaagatcttatgggcaatggctggaaattgcaggcgaagtcggccagtgttgctgagcccactcccaagcaacaggttgccgaggaggtcgagcaagatgcagaagcgcaaagcatgactgccaagaagggagagacaacttccacgcagcccactaaggcccagggaattattgacgacgatccgaatgctgaagtagcccgacatgctgcagatgcccatgctgagaacggagcggatatcggtgaagacgaacagttggaggaggcgaaggcgcgcctgcggcaagaagtggtggacaaccgcgcagcaaaggctccgtctgcagctcccgtttggttcttccttttcgtagttgtggccgcactcttcgtgacactctcgaacgacagtgtgtcgcgctcgatccgactcatgttttgtgccagcgcaccacacacgcacagtagcaacgagtagatggagacaggaagcagcaccaggtaaatttgtgggtgcccctccttagatgatgtcctcaactttgattctttactgcgttgcgcgtgggcctgtgttgctttgagtaattgcgtcaagtctccaagacactaataataaatagggggcagagccaatgtacgctgttttcaatatcgcagcttacttcagctgttctagtagcgacgtcagggcttgctttgcgctggtgtttagaccatccccgttagtttcctcaacacgccggaggacttcaagaacgccattgccacggcaccagtccaagttttcgttattcgaaatcacagcactgtccagcgccagcaacgcgttcgtctgaagcgactccaacgcttcaccagcgaggtgtcgtaccagcattgcaagtccaccggcctcggccacaagcgactggctgtcggcattcatttgcacgccgtggtgcacagcccaagcagcgctgctattgacatcttcagcaaaaaccggcgagagcaacagcacaagagcaggcagcgcgccactctcgcgaagcagatcctgtgcgtcgatatcccgtccagaaagaatgttccccagagcgaaggccgctgcactgcgcagcgggtcgctgtagtcgtcttcaagcagctcgcccattcgcagcacaccgtcttgctcgatgatctgccgacgtccctgagagctgctagcgatgttcgcaacacacgtagaagcggcgcgcttgatagcttcgtggggactcgccaatacaccaagagctgcgctcacaaccgtcggagaagacacagcgtcagcggcagttggctccagcgccaggttgccaagcgtgaggcaagctgccgcctgcagtcgtgggtccgtttgcgccaggaaaggggtcaggatcgccggagacttcagtctcagcagttcttgggacagcagcggctcggccgacagacggatgagcgccaggaaggccggtaccagcagatcggacgacgcgatcgtgtcgctgtcctgcaagaagctcagcagagcctccagcgcgtcgctgtccacgatctccagcgcatgtcgctccttgaccgtcgtgtccaacgaagagctcagctcgagcgcgttgatagccgccacgcggtcctcggtggacgtttccttggccttgagcgcctgcgccagatcgaagatgctgctgctggacgacgtcgcgaagctccgggacgtggcagcgagcggcaggaagttgcgtccacgagccgaacgggcaggaatcgatgcagcagcaaacgctctcgtagtggcagtcgcggcagcggggaacgctccccagcgacgcgcagaggcagccgccacgcgcttcagcagcacacgaaccatcttgtgcggcggagcggtgattgtcaaaaaatgccgaatgtcgctaattcattcatttcagtgacatatcgcaaatttgttattcaatctagtgacatcttacaatatttcggacaccactttttgattcatcgcgggacgcaagcactatgggcaagaatcgccacagcaaggaccggttgttcatcacccagacggagcacaagtacctctatggcggcaagaagcaggagatccgtcgggcctacaagcgtgcgtccttttgtcccttaccgctcctgtttggttccctttctcctttacttaatcctctctggcgacgctgctactgtacaggtctgccattcaactgctgcgccatcacactctgccccttcacggtacgcactccgtgcccagttgtctcatgcgtgctgtatactaaatggttgtgttggttgacgactgcagaacccggtgtgcacgcgcgaggggcacttgttcgacctggaggccgttgtgccgtacgtcaaggagcaccagatcgtacgttgtattactgtgtctgcaatagtgctcagattggtccgatggcagttctaactgcggtatattatactgtattcagaaccctgtgacgggaaagccgcttgctctgaaggagctgattcaactgcacttcagcaaaaactcgcagggagagtacttctgccccgtcacctacaaggttttcaccgacaacacgaagatcgctgctatcgcaactacgggcaatgtcttctgctacgaggccgtcgaagaactcaacgtcaagccaaagaactggacggtacgaaaactttcgtcgtgtctttaatgcgcgccggttgctaacgttggatatctctgcggctttgtcgactaggacctcatttccggtgccaaattcaagcgcaaagacatcgtcattttgcaagatccgcaagatttttccaaccgcgaaatcgacaacttcgagcatcttcggcgcgcgaaagcgagcgataatgtacgtagcacaaatagccttcacactttcgcctttggtggcgacagcgatcctgactaatggtgtggttttgatccatagagcgcttctactacagcggcagctcggaacatccgcaccaatgcagctacagaccgcattcttcaagaggtgagtcagtggttgccctgataatcaagattagagaatggagcgctgaaatgaactattgctgatgctattatgtgttgtagctggaagctaagaaagcggcgcagaaggaattgacagaaaaaattaaacgtggagctgacgacgtgtgtgagaaggacaagatcgtggcctcgctaacccacagcaaacaatcgcaagcagaggaaaagattgctgctaaaaagacggcgcaatcgggaaagctgcagtactctcagtttaccgctggcgactgctcgagttcgttcacatctagtgtgagagctcctgtaacgagcaacgcagtggctcttgcatctgaacaggagctgctggaacggaggtggcaagctgtgcggaagttgaagaagaaaggcctcgtgcggcttgagacgaccctcggcaatattaatctggaagtggattgcgacttcgttccgcaaacggctgacaacttcatgagcttgtgccagtcaaaatattacgacggcgtgctgttccaccgggttattaagggtttcatgatgcaaggaggtgacccaactggcacaggtcgaggtggtcaatccatttggaagaaaccattccgtgacgagatcgacagcagactggtgaggccacttttccttttttcttgcaatttgaactgttgttgtagctgacttgtattgtatcggcgttaaatggatagtcgcatgatgcgcgaggcgtactaagcatggcgaactcgggaccggccaccaacaactcccagtttttcatcaccttcaaggcatgcccacacctggacaagaagcacgctgtattcggccgcgttgtcggaggaatggatgtactggacgctgttgagaacgtagagactggtgctgaggatcaacctatcgaggatgtgcgcattaaaagtgtccaagtgtttacgaacccatttcaagagtatgaagaagcccaagaacggggtctggatgtcgtgcaagttgccaaggaaaaggctgcgcaggacgcgaaacctaaggtgcaaggcactgttttgaaggtcgggggcaagtgggttgcctacgacgatctgggagaagtggatgtggccagtattcctacctgcgaaactaccaaggatgagaacgtgggtaaatatcttcagactaagtccgacgcagccaccaagaaaagatcattggagcccaccatgcccactgccattgaaagcaagaagaagagtaagaagcaatcatccagcggattcggcaacttctccggttggtaatcttagcggtcctatatacacccgaaacggaaagcggcgctatattgatgggagtggaaaactgacgagctccacaaagggctactgcggaagccggtgtgacaaaggattgcgatggacaagtacgtagtcgagaaggtcatcggtgagggcacctatggcatcgtgtacaaggccaaagaaaaagtacgtttccctgttctctagaacaatcaagttcgtttgtgctcattttgtacgtgcgagcccaggcaactggtgaccacgtagcaattaagaagtttaagacggctggaggtaggataattgtcgcttttcacagtagcggacaacaacttatgtgatgccctcgtagatgaacagctatcgaagcgagaaatacaggcgtgctctatgctcagccacccaaatatcgtatcttaccgcaacagtttccggcacgacgggttcctgcatctagtgtttgactacgtttgtgggggaatggtgaaggtcagcgcaacatgtacaagtattgccgcttttgtcgaagatcgctaatctctttcgttaatggcagctgctgtccaaaaacaaaaagggtgtgaaggcgcaagaggctagaaagatcatctaccagttgtgcaaggctctggagtattgccactccaatcgaataatccatcgaggtacgcgagttcgataagctcacaaagcgtacatgtgtatgagtatgagtgtgtgtctaactctgtgctgtcagatgtcaagcctgacaatatcctcattgatgaaaacggagacatcaagctgtgcgatttcggtaagcagattcactgcacgtagcgagcgacgtatcgattgtgtaacaaacgccgtatttgtaggcgtggcgaggactgtgcagtttgaaggtgatccgctgacagactacgtgtcgactcgctggtatcggccgcctgaacaggaacttcggtgagtacttaatcccatccgttctaatgacaatggctcctcctgacgcgttcatttttctagttccgatcgctactctttcgacaccgacgtttggggtgtcggttgtgtgctaatggagttgctcacaggccgaccacttttcccggggaacacgcaaatcgatcaaatgtgaatctgacgcttgcatagtcctcagtacagaccttcttctaatatgagttttcttgtttgcgcacagcaaccttatccagagttatctaggacctcttcctgcggctctcattcctagaattcctcgtggcgttgtctccctccaagcaccgtcaaagtctttccaagaccttttggacgatcggtcacttccagaaggaacactcgattttctcgtcaacactctgcaacttgaacccaagcttcgcatgtcggcaaagcagtgccttgaacatccatttttgcgatcattgcgcgatgcagagctgagagaccgtgaaaagcggcgccgagcagggcgtgggattcgcttgagtgatgatgaaggaattgaggaggacattccaggagaagattcgccatcctctcgccctcacccaaatgagtgcaaggccgaccaaaagaacgcggaaatggatagccacaagtctggccctcacacttttgacttcaagcatgatggcgagaataaagccgacgatacagcatctgccaagtcaaaacaccgtcgccgtgcctacgataacaacactgactgtgacagtgatgacatccaagaaatcatcgagactgatgaaagcgactctctgacgcgttcacgctctcgacagcaacgacacggtgactacagcgatagtatcaacaacgactataagtcgcttcgagatgctccgcctcgatccaaaggtgctacacgccgcgggcctcttacggcctcggcaaaagcagacgtggatccattggatggcgaaaattgctatgaagacgatttcgaggagtaccaccactacgaatgattccgagcaaagtacagacgtttcgagctacggtgtgaacttcctgagcaccatcccagcgatgcgatgggtggacacgttcgggcgtcgtcaaatgcttttgatcggtgcagtgggcatgatcatcgggcacctgttcgccgccatcctgttcactgcaatctgcgacggaaacgtggacaatgctggttgcccgaaagtgggtgggtggttcatctgcatcggtacagccttcttcgtcttcaacttcgccatctcgtggggacctgtgtgctggatctacccggccgagattttcccgctcaacgtccgtgcttcggctgtggctttgtcgacggctgccaactgggctatgggcgctgtcatgacggaggtcgtgaagcttttcccgtcgctcaacatcaacggcgtgtttttcctcttcgcgggtctgtgtctgatctgtctggtcttcgtctacttcttctgcccggagacaaagggcattttactggaagacattgaggttcttttccacaagagaaaggcggcccagtcgccgaactttgtcgaggtgaagtcgccggtcagcttggcctaggatggggggtctgtcgtgagctgcaaacaaaggagtcgagaaatcaaagtgttaatacagaacattgctccaaccacgtagtacaggtatagtttgatgaatatttgggccaaagtcgtgcgtgttcttagatgcctgcctgggtgatgtccttgatgataagcgcaccatagctcatgatggggttgatgccagtggcttgctgcaacacctgcagtagcatggcgataatcaagcgcttgcgcagcgacacgttggtgacgaggtccaagatgccctcgccaccagcctcctcttcagcgatctgatcaccgatggcttccagctcatgtccgacactttcggtcattcgaagcttcttcaaaaccttctcggcccccgccttacccttcttcttgtacgtccagcgagggctctcgggcatgaaccaaatgccaagaagcacgacaatgggcggcgccatggagacaccgttggttgtacgccacccgcggttgcggttctccacgatgatgttaaccacgttcgctaggaacagtccgatcacacaggtcatctgcatgaaaccagacaacattcctcggagctccttgggggccatttcggcaccgaagagcggcagcgagaaggacgagttgcccactccgaatccttggatgatacgggcgatgtacatgagcgagtgtgcgtgggccttattgaagcagacccagcaagtaccgccacagaacagcaaacctgccgagaagatcgtcgctcggcgaccgaatttgtcagctatgatgccgcccatgaaggcacccacaagacaacccaagttgtacgccatgttgtaccaaacagtgaacgttgtccactcgctcggcaggtccgaggtcgatttcgtgcagtctgcgtaggtgaagttgtgccagcccacgcagtaatcgttgaggaacgaatccatgatgagcactccagacgtcacgccttgatcatagccgaagaagatgcctcccaacgacgcaaagacgcagacgatgatagcgtacgtgcgcgagccctcggtcggcgtgtcgtcgatatcgggcgtgttcacaatgactccggctgccatgcttcaaagtctccgaggcgatgcttgactggaaggcacttgagtggttggaggcgaattgcagaatgaatggacttctggagctctcggtcttgtcagcgaaacaagtaggggaaaacaagacggtatcgtagtggtcattgatgcgtgagcagttcgttgaagttgcctcgttaaacgcgtgcaagttacagcagtctcggagcactcatactacaagtgatagagtctagggtgcactaccggtagtacttgttgccctctgcgcaacttgatttattgctccatgagaacagccacacactgcatggggaagtcgacaagaaggcaactcgactccacgtcccgcagcaaacttcaagtccggaaagctttgcacagtcagccacaatggtccactttggaaagtgtaagtggcacttacgcggagtaaggtgatagatctatccgagcgacctgagggccttcctcggtgaggggcacgcccgttgcaggcggcgggtatgccatgcttttgatcgagcatgatccgcaacatcaattggaagttaaaccgagtttctgaagtgacctggctcagccaacctcttgtttctgaacttcaaccgcgactggcactattggggcccccaatgggggaccgtcggaactgacaagttgtcagtgacaacagaccacgagtcgtggtccacgacagacctcgtggtcatgagtcattctgtcaaaagtaagctctttgtgtactactactattttaatattaaaacaggtagcataccggttggtagtgatttagcgagctcaagctaatgccgtcgttcagcgcttttcatctcgtacagcagcgaccgaatggtgtcgtaccgctgatcttgtgaccatccgatcccaaatgcttggagacagcatccaaggcggaatagcaactccgcgattgttctgtcccaatggggctcgtaaccctcgtatgttaacccttccatcgtctccttcacgaactggaggcggttttcaaacacagaaacgctgtacgtgtcgtcacgacaccatccacgcacctcaactagcatcttgcagagtttctcttgggatgacagcgacttcgtccgcgggggtctcgtacttggtcgaaatgtacctccgcagcttcgctgtctcggggaactcccgcggtaaacgctgcatgagaacaagaatggctcgcaactcacttcgctccacacgaatctctctctggacaatgctgagaactgtagaggtcaccgctgcctggatgttgtccatgtacaacgcgatgtccgctccacggtccttcgcgtctgcaagggtgcggcatgtttcttgcagttgggcaatcgccgtgtggaataacgagtgtcgcactgctagcaaacacgagcgcaccactgacccgaattcgcctcgcggagcaagcgccagtctcttttccagaacctcgtcgggggtgagtttcttgactggtggaagggacagggggtcaagatagcgctcgggtgccttacgcttgcggctgcttggtctgcgtggagggagcggctcggctctagttcgcgtttcacgagcaaaagggcgtatctttctcactacaccacgatgttgcggagatggcgtcggggaagtgggtctgctcacggactgagacgttgttcgagcagccatctcgtcattctctcttggtgctgcgtgctccagcacatcattgtctgcttcccgcgtttctgccggctctggggtcgggctcattatgctcctcctgcggggcctcaggttccatgaggtcgatgatctcgtgaggcgcagcggcccgctcgtcctcatcctcggtcgcggacgacgacgcatccccttcgtccgctaccgcagcaccaggaagattcactgcatggtgcagcttcctcatgagaggcccaacatcgttgcaagaactcacgacacgagttagcacggcggagacgctgggggaagcgtccgccaacgccagcggcgacgtgtgcagctcgcgggacgcctccgccacctgcagcgcccgcttgagggccttcagagccttgagcagccgcttctccgcttgctgcatttcatcctggacggcggccaagcagtgcgcttggagggcagcgtcgctgacgcgggtcattgcgatcgcaaaaatgtgtcagaatccaaaatctgaagatccaaatctagtccaagattcagatctactgtatggataacgtggtttaccaattcatgaccagttcatggactaaagcgactattatccaatccaatcttcttattttgactaatattgctctgattggctcaatattttttaaccagatcttggccctcacttttccttacgctgatcccgtcagatatcgagtcgagcgtaagatgaaggcggccttcacagacaagcagctagaagaagctatggaccgcgtcctcgcaggagagaagctcgcagtcgtggccaacccgtcaccagtgtcgttgtcaacactaaagcgcaaaggcgactttgcgccgcgcgcagcgaaggtcgatctattgagcgccaacggcccggacctgcccccctgctgccccccgagtgtgaagccgatctagtggcatggattggcgccgaagtgcctgcagtggagccgctgttcatcatcgagagcgcaacggtttgagtttggtatgagactttgtatgggtccaacatctggtcagtgcgtcataaaaaaataaatttccgctttgtttgcttcgctattgcttgctcatatttgatcataaattggtgcgaggaccctaaaaattaagcgtaccgactgcttgtataaatgctagcgttgtaggatcgctgctctaatattggtgtcgtcatcgacgatttcgcacgaggtgctgctggcgggtcatgaattggtaaaccacgttagtagtctattatccggacaggtttgagcattttttttaatttgaatttgccgcgaaaatggacgtgatactatcgcgtgctgggcttagcgccactcagcagcgcacggtctgctacggtgctatgaaggacgaggtgacgaagacagaggccaagctggcagtgtaacggggtaagagataccgtcactagcgtacactgtagataagaggaagcttgcaataataagctcaagtcttgtctttagggtaaaatcaactctgtttatgtatgggacgggggacggaggcccccttactaggctccccaacgttgtggctcacaacgtttcccaacagatggaaacaacaacgttgtaggttgaggttgagttggggcaatacgtttcacaaccacaaattgctctgtccaagaaaaacttatgcatatcatacaattcagtaggtggcaatcgaagtgcacatcttattttgaagcagtttcgcaaaactgggcacagatcgtgtttggagacctatcgtaccatggacgccgctcccgggactcccggcagacgaccgccaaacgagtagttcgcactcctgtacgtcaagcaacaacgcgggggcttcgaagttcaacgtcggttcagcgctcgtcacgtgggacggcatcacgagctcgggcgacaccaagaactccacgcggtcgcccactaccgagacgttctcctcggcttcaacctcctcgcccaacgacagttcatgctgagcgcttaccccctcgcatcccagagccgagtgttcagtttaaaatggacggtgctcatcgccctgaacgatgggaattcattttccttgttccccacgagcagtttgcttctgttccgaaggacaaattgatctctaagcaagctgcatttacatactgtacggaatgcagttgtaaggtgacgtactcgcatggagccactactgctgtgaaggtgcacatggaaaagtaccacatggaagttctactacgtgcgaagcaagcgcaacaagaggagagggtcaggtcggctaagcgtcaactggagaatgcgtatgaccaagcacctgagtcgtcgaagaagcagctcacggaagtctcggacgccgtacagacgtatgtgaatgggctacttgcgaagtgggtagcgcaaagtatgcggccattatcgattctcgaagacccatggctgctggaatttattcgatttattacgcaggagctggctggcgtcatcttggacgttcctggagcaacgcaaattcgtgcggatattgtccgtgtggcggcggagcttcgtgcatcattgaagtcttagatccgtagcagctgccagtttttttgcattacgacggatatctggacgagcaaacgggcgcagagctatatgtcgtttactttgcattacgcggaggaagactttacactatgtagctgggttctcgaagtggaggcatttcctggcatgcataccggtgtcgccattgccaacggcctggagggtatgatggagcgttgggagttataggcagaactgtgtacgttgctggttcgtgatggcgcctcgaacgcagttcttgcagctgagttcatgggtgtcaacaacatgtcatgtattgcgcattcgcttcacttggttcttagcgctgctttagcgcgacagaaagaagatacggccgttgttgatgcggctgcaactgacagcgaggttccagtcggtaacacaactcctgagaccgctgtccacccagcggctcactcggtcatccaccctactggccatctcgatcaagaggacgaagttgtccaagccccagaagcagaacaacaagctgccgtaaatgctgttgaactttttgtagccacgtcgctgtcaagccgtgattcgacggcaaaatcagcgttggggcaaatgcgcgatattgttcagcgttttagaagcctcgccacgtattttcacaagtcacccaaggcgacaaaccgacttgaccagattcaactcaaagactggaagcgctcggcactgcatctcatcaccgattgccccacgcggtggaactcatgtcgcgacatgctggcccgattgatcgagctacaggcacccttggatgatttcttcagtcgtctagagagaccggagttcaaggaagagttcagagacttgagtcgtgataaacttccgaagccgagagaatggtttgcaatcaggtgcctggtagccgtgctggatcctatcgcagctgtgacgaaagtgctcagtggggactcctatccgactttgacactggcattccctatgctacgcaggatcaaagcggtactgggcgactccgacatcttctcgaagcaagcggcattggtcggacgccaggagttccagcgtgaggtcctcgagctggtgaaaaatgtgcgcaaagccgttctgcacctcttcacgcagcggtttagagggatgagcttcgacctggtctggataacgttccttgaccctctcttccacaagatgaaactactgacgcaatccgaaatcgaggaagccaagaaatgtttggttgatgctgctgcacttgctgtacgcaattccaccggagaatcagctacgcctgttccagacgctcgtgtccgtccggcaaactcatcgccaagcgatgatactgccgctgtctgggatgatctgctgcggtcggacgacgaagatgtcaacactcgcaccgaccctactttccaaaaagtgcaactaagttgtgcaagcgagttcgtggcatacctggaagaggccaagacagtcccacgagatcaaaatccgctcacgtggtggtccgttaacggtcacaagtatccatcgctgaagctgcttgccaggaaatggttgggctgcgttgctacctccgtgccttctgaaagagccttctccactgcaggtaatgtcgtgactgcaaagcgctgtcaaatggaccctgatcttgttcgcgacatcgttttcatatccgagaactgcggaaacccccagaagaaataaactcgacttgacgccaaagcatgcttgcccccgtaattcataccgattgctgccgcatagcaccactctccttcacaagttgttgattcctcccaggatatgccatgtgctcgtgcaccaccatgctgtagcggacggccactaggccctgccgaatcaacaggcgctgctcgtcgcgctccagcactgcgtctaagtcctccaagtacccccatgatcctgcttcaacctcgtcttgaagcccgtactgatcgcagacacaaagtgcaccgacttgacgccagtgcgactcagcgccaagaagaagtcgtagtccggcatcggcagcagcgtcgacaccgtcccagggtacctcgcgctcaacgcgctcaacgttccgcgcgggtacgactagagctccgactggtcgaacagtgcgccagagctttcgcggcggaaacgcccgtccgtgcgcgtgaagagcttgctcatgcgcaagaagtacgtgtcgtgcactcagcgctgcgacttgctttccacccccacttaggtcaagtcgaccaagcgggtcagcacgtctccgaatgacatttcctcaagctccgccgggaaaacctcggccgtctcgacgttgcactcgcagccgaagtacgggttctggtagtcggcattcaggcgcacgatgatgtcctgcttgttcaggcggagggccagctccacctgctcgcgcgggatcgagaagtacttgttgtcaaactccttccacagcacagcgcagcggttagccaccacgtggatcggctcgccagctccgacgccaccgtgacaacgtcgcccgcgacgctcgtgtagctcgtctcccactccagctccgactcgataccaggcgtgtccaccagcagcttcttcactgccggcgcggtcgcggcctccttcgcgaccatcacgcgagagcccatcaggataccatctgcaggcatcttgtgcaggtggccgcgggccagactccactcgcccgtgaggtactgcttcgagtcctcccagttgccgaagccagagcccaccaccaccagcacgttcgacacgcgacgattggcggcgtacgtctcctccatcggctggtggaagtcctcaaagctttggtggccaccagcgcggccgtcagtccactgcagcatcacggtcattgacgcatcgccgcggcaatctccagcaccgcgtggataccgtccaccgaaccgggcttgaagcacaccaccttgatgccaacggcctccagctgtgacatcatctcaagcgcacgctcctgcgtcgggataccggcaccaatcgtgatgctctcgataggcacgccgctgcggcgcatacgaagcaccatcgggaactggaagccccactgcttcgcggtcaggtacagcatgttggttgcgatgccgaggccaggcttgatcttcgacaccagctcgtccaccgcgtcctcgaagatgttcgggcgcaacagaccacccgccgcaagctcgccgtggaaacccgcgttctggatagccgcaacgaggtcgatacctttcaggctcgtcgtgggcgtcatacccgcgaccatgatgggaggcttgttcagcacgcgcgtgaatctgttgtagatcttgcccgacgccgtcacctgcgggccgaacttcttttcccacgccgcctcggccggggtgaggctcggcgcagcgtcgatgaactgctgcagaccgatgtgagggtcgtacttcgtcgatgtgctcataatcggatgctgggcggtcgcaatgaccacctcgatgcccaggccttccgcaaacttgtcgctcagctttgctacgccaagatcgggtccaaacgccagcacgtgagttgcgctcgagtggtgctccgcgatctttgcccacgtcgccgtccagtccacgagcttcagcaactgcatgttaataagtatatcgacaacgtcgtccaccgtctgcaggtggttgcctccgtagcgttcacgggcacctaccgctggctgcccttgatggcgcacttgacgcgctcagcgtcctggaccagcttcggcttggcctctgtcagcagcggtgtgtggaaaggagccgacagcggcaagaacgacagcgagcccgtgggcttccgctgtgagtgcgggatgcgcgtctggttggcgtcgggctgggcgaacaggccttccagcgcctgcttcagcagcatcagcgtggcggggaagcccgtcacgttcaccacgtccgacgcgttgatgagcgacagctgcaggtcgggcgtcttggtgcggcgcttggtcacctcgatggccttgaccacgtgctccttcttgaggccgcgcacggcccgcatcaggccggcgtccgctaccttcttggcgtcctgcccgtaggagctggtcgtacgtctcctgcgcgcgcagtccctgccagaacttgtagcgcaggacgcagacaccgatcgcggcgaactcctcggccgtcttggtcgccaagaagataacggcgctcaccacgccctggctgtggccgacggccgtggcggagctcttgaccacgctctcgtggctcacgcccgccgacccgaggaagttgaggtagttggcgcactgcgtcagctccaccagcggcatgctgaagtacacgcggtcgagcgccaagtctgcgggcgcgtcgccgacctccaggctctgcagccagctgtgcacgacgaccgcctcgacgacggcgacgttttgaagcgtctgtacaaaacaaaatataaattttcataaatcggtttgtcaacgttttttataaagctgaacaggtaaaaccaacgtttctctgaacggacaaacgttggggagcctaccccttaccttgtgaaccactcaaatctaagtctgcacctgattggatgaaatgggtctggctcccccctttcaaccaatcagaacatgacagcaggtcacacgctagccgtgtgactgcacctacttttgtgtatgtacctatgtaacttctacctacttatgtaaatgggccctttacatcaccctcctctcgaagttgcgcttaggtaacttaacccaccggcgacccgattttgcagggataagattaatatagaaaattgtataccagcgggatagggtaagcgaggtccccagtggatggcgccgacccttcgggcttcatcgactttcaatctcattggttagatttatccaatcaaaagttggctaaggccttaattctgagcgggttcaacactaagcatgaaaaaccttggcgtaaattgtcctaaagatcgagatatttccatctgtagagaatccaaatcaaattgttgtgaaacatgagcgaaaaattgtggcactaataaactcacccttgcagctacaagagccctgttgatcttactctggatggccctgttcaacaacgcggcagtagtccctcacgagcctgccgataccgcggcgtcaaggtttcatcggtaagctgccgttgtagtgcggcggagtgacctagataacaccagcgatctgtccatctagagcattggtgtatcacatcgacggagtgggcgcatagagcccttctaatataagcgcctagaatgagtagaaagcgctgcgcaagtgctgcagcgtcaaaatatagtgtgtcacatggagctgccattattattccggcaccatgcatgccccccacgcgtgttgacggggttgctgttactcttgatgctccgagacttttgcgccatgatttctaaccgctgtttgtcttaagaacatgttggcgccttcctaatatgcagttccgatgtaagggtatgctactttgctagcaccagtttcatgtttgagcggaccgcaaaagctgccgagtcagaggcgacaagctaacaaaacctggattaggttgctatgcgaccgctttggtctatacgagagatacatgacgagaacaatcaagcatagctgagggtctttagccgtttctttccggcgtctacgctgccgaagtcgatgaggcacgtgcttctactggttttggtataaacttgatgaagcgacgttggccgtggccagatgctcgcgtggccatgtctgttggctattgtatgaccaaccacgtcaacgttgcttcgccgttttgtcaatattggcatgcttgtgttgatctgactatacgaattgacatagcatcagacatgtcgacattgacctatttgactaggtttttgtatggattcatgtcgtgattgactccgatatgacagcagtgagatgtttggcttggtttcagtataactcaatgcaaacaagtgggtgtattgttccgttactccatgaatctgatggagtcatcaggggacgcgaacgggatggccgtgtcgggcatgttggcgtcagcgcgcgtgccgcaaatatcgggcatgttgggaaccgcggtatgtcgacgaccacgggcgtgtcaccctgccacggttatcaggaccaagcacgcgatgatcaagtcagacatgtcgaggtcggcgagcgtgccgtccatcccaggcatattaagagccgccgggatgtaggcggtgccgggcatgtaggggaccgcgggcgtagcatccttggtgggttaaccagggccatacacggggtagtcgagtcgggcatgatgggatcctcgggcatgtcgtccgtgtcggccatggcggtcgcctcgggcacggcgtccgtttcgggcatggcggcggcctcgggcaacaggcatgtcgggagcatcgggcatgtcgacggcctcgggaaacaggcatggcgggggtgtcgagcatgtcggcggcctcgggcacggcttcggagtcgggcatggcggaggcctcgggaaacaggcatggccggggcatcaggcatgtcggtggcctcgggtgtggtgtcggagtcgggcatgttggtcgcctcgggcatggcctacaggtcgggcatgtcggtggactcgggcatgacgttggcgggggcgtcgggcttggcggtggcctcgggcatgacgtcagcgtcgggcgcgtcgggcataccggcggccgcgagcgtggcgtcggagtcgggcatgccagtggccttgagcaacgggcatggcgggggtgtccagcatgtcggcggcctcgggcatggcggtggcctcgggcacgacgtccgggtcgagaatgtcggcggcctcgggcatgacttcagcgtcgggcgcgtcgggcatactggcggccgcgagcgtggcgtcggagtcgggcatgccagtggccttgagcaacgtgcatggcgggggtggccagcaagtaggcggcctcgggcatggcggtggcctcgggcatggcggtggcctcgggcacgacgtccgggtcgagaatgtcggcggcctcgggcatgacttcagcgtcgggcgcgtcgggcatactggcggccgcgagcgtggcgtcggagtcgggcatgccagtggccttgagcaacgggcatggcgggggtgtccagcatgtcggcggcctcgggcatggcggtggcctcgggcacgacgtccgggtcgagaatgtcggcggcctcgggcatgacttcagcgtcgggcgcgtcgggcatactggcggccgcgagcgtggcgtcggagtcgggcatgccagtggccttgagcaacgtgcatggcgggggtggccagcaagtaggcggcctcgggcatggcggtggcctcgggcacgacgttcgggtcgagaatgtcggcggcctcgggcatgacttcagcgtcgggcgcgtcgggcatactggcggccgcgagcgtggcgtcggagtcgggcatgccagtggccttgagcaacgtgcatggcgggggtggccagcaagtaggcggcctcgggcatggcggtggcctcgggcacgacgttcgggtcgagaatgtcggcggcctcgggcatgacttcagcgtcgggcgcgtcgggcatactggcggccgcgagcgtggcgtcggagtcgggcatgccagtggccttgagcaacgggcatggcgggggtgtccagcaagtaggcggcctcgggcatggcggtggcctcgggcacgacgttcgggtcgagaatgtcggcggcctcgggcatgacttcagcgtcgggcgcgtcgggcatactggcggccgcgagcgtggcgtcggagtcgggcatgccagtggccttgagcaacgggcatggcgggggtgtccagcaagtaggcggcctcgggcatggcggtggcctcgggcacgacgttcgggtcgagaatgtcggtggcctcgggcatcacttcagcgtcgggcgcgtcgggcataccggcggccgcgagcgtggcgtcggagtcgggcatgccagtggccttgagcaacgggcatggcgggggtggccagcaagtaggcggcctcgggcatggcggtggcctcgggcacgacgttcgggtcgagaatgtcggcggcctcgggcatgacttcagcgtcgggcgcgtcgggcatactggcggccgcgagcgtggcgtcggagtcgggcatgccagtggccttgagcaacgtgcatggcgggggtggccagcaagtaggcggcctcgggcatggcggtggcctcgggcacgacgttcgggtcgagaatgtcggcggcctcgggcatgacttcagcgtcgggcgcgtcgggcatactggcggccgcgagcgtggcgtcggagtcgggcatgccagtggccttgagcaacgggcatggcgggggtggccagcaagtaggcggcctcgggcatggcggtggcctcgggcacgacgttcgggtcgagaatgtcggtggcctcgggcatgacgtcagcgtcgggcgcgtcgggcataccggcggccgcgagcgtggcgtcggagtcgggcatgccagtggccttgagcaacgggcatggcgggggtggccagcaagtaggcggcctcgggcatggcggtggcctcgtgaatggcgtccacgttggtcatggcgtggccacgatattggagacacttgagtgcttgtcagcgttttgagaaatgagctaccgatacggagcggcggcgaggttcggttccgttcacacgcgcacgaagacgcgtctcgattccgaacccgggggaaaaattgtaagtaaatatattggttattttaggagtaattgacgatcattggtggaatggttggaatacatgcgatgattggtggacttgcttcatggcagcaggatccacatggcgcgaaagtgacgaagatgtgcacgttgaagtgatcgcgtgacgtgcataacgtagctaaggtgtggaagtcgtaagtggcagtagcgccacaaactagatcgtccagcattttgcttaccgataaaagaacccattttggccgcagtgacggacaccggcggctgtgatcacagccgccggccgtcctagctttagtatcgcgctcagaaacgattatacgatgcaatataactattctaggctgcggcgccggccccgcacgtgtcggtggcgctgcatgcaccgagattactactgttataataggaaatcaagccaacgttgactccgtttgatggtgatattaagtcaaggtggggataatccacttgctgtcgacatgagcggggagcctagaatggtttgattgcatcgtataatcgtttctgagcgcgatactaaagctaggacggccggcggctgtgatcacagccgccggtgtccgtcactgcggccaaaatgggttcttttattggtaagcaaaatgctggacgatctagtttgtggcgctactgccacttacgacttccacaccttagctacgttatgcacgtcacgcgatcacttcaacgtgcacatcttcgtcacgttcgcgccatgtggatcctgctgccatgaagcaagtccaccaatcatcgcatgtattccaaccattccaccaatgatcgtcaattactcctaaaataaccaatatatttacttacaatttttcccccgggttcggaatcgagacgcgtcttcgtgagcgtgtgaacggaaccgaacctcgccgccgctccgtatcggtagctcatttctcaaaacgctgacaagcactcaagtgtctccaatatcgtggccacgccatgaccaacgtggacgccattcacgaggccaccgccatgcccgaggccgccgacatgtccgacacccccgccatgcctgttgcccgaggccgccgccatgcccgacacggacgacgtggccaaggccaccgccatgcccgatgcccccgccatgatcgttgctcaaggccactggcatgcccgactccgacgccacgctcgaggccgccggtatgcccgacgtgcccgacgctgacgtcatgcccgacgcccccgccatgtccgactctgacgtcatgcctgaggccgccgacattctcgacccggacgtcgtgcccgaggccacctgtgaaaagtctcggtggatttcgccaccgaacccatgtccagctgacccgtatcaatccaggatgctgacccgtatcaatcaagcagatttcaagtgcgtcatggccgcgatggatctggaccaccaactgtcggacatgagccgtgagacgaaggaagctgagcccgaggtctgggcggagctccgctcagactctgggcttgagcgaagattgtctgagacccgagatgtctggtgttgggtatcccaagtctgagctgagtccaggaagcagagagaagctacgcggagtttgagctgagcctcgagtgtgatgaccggagtccccgctcaggtcgaggagctgagcggagccgggtggagtttgaactcaacctccccagcggttgtggagccgtcgtccaagatgccgagatgagtcgaggagcaggcgtccgagcgaggtcgtgccgagccgggcccagcttttactgtggtcatggagctttcacccaagtcgacaagctgggcgaggatcgaaggtctgagcggggtgacgtggagtccaagcccggcctcgaatgcgatgtttgaagtctttgctcaagtcgagaagccgagcggagtggcatgggcctgagtggagttgtcggagtccagttgaagtgccgggtgaagagtcgctgaacttaagtccagacagtggtactgacggcgaagttggtggcaccggcgagtacactcatccggtgaatcagccatgagccagcctacattgggtgcgaccgcccaagatcgcggacacttcaagcggatctcaacggcctccagcggctccaagacgacgcccgccgacgtggagccgccgcattggccaagaccaaggatatcgggcggatcttcaagggcgcccggtaagcatacagccgatgctcttcgcgcagccagtcagtgtggatattgagcccccacttagtgagtcctagtttgtgcatgtgtaaacagttaaacagagttcgttttgccccgacggacgcaagtggtggaggtctttggccagaaggtgtcttggcgatcatccacacaattcaagctaacatatcaacgttgtcagagtgcttcggtgcgacgacagtacggttatttcatattactgttacatcttagggtgtatttcatattttcgggtggaaggtgatccattctgaggtttaggcagggtaattgtattgtgtgcttggggacattggcgtgccccggtgcattgtgtgattattagtatcggttcattgtggacctggtgcgcgggtagtcccagggtgtgtgtgagtgccttggattcgaactaggctcaaaccgagtcactaactccagaccgggtcgttgcttgactcgaagagaagaaaggagaagctggtacgagcctcgcccaggttcagagaaataaaggcgaactcggcccagacccaggccgaccgggaaagaaggggtgttgtggttctgagccggaaccaaagagaggaagtggaggctatattgtgtgtggtgttgtgttcattaaggaaaacccggggcatttcgggctgtggacacgtgcggactgggactcgccaagtggggagcgagtttcgtctgggaacacctccggagaccttcaacatcgacagcagctggtgtggccgacgcgagtctgggccctcagcgtagccgtgatcaaaagaaccgccaaggggatcgcagagtgaggaacacacgcctcacccgacccgagtcggagctgagccaagcgttcaagcggctaagcctagcgaagcggagtgggagtgttcgctcagtggaaggagctgagcggaactcctgcagcgctaagcagggctgagtcaagtggtgcaagggctgagcgaagacctcggtcgagcggtctagcaacctgagcaaagagcacgggcgcttcgtcgcacgtggtgcgcgtgcccggatcagggatacgactttggacggacaagctacagtcatgtcgactgctgctgattcgaaggaaaccaagactggaggtgagaagagcgagtcttcgcttcggcgaagtttgagagtggctggattgccagccgaggtggtgccgacggagtctgggacgcccagggcgagaagatcgactgcgggagcccggacgcccagtgctgagggagaagctgcgtcgtcaggcgaggctgcgccaagcgctgagccggaggtgccaccaacgacggaaactgctgtgccgccgccatgttcgcccgagaggaagaagtctgagaatgaacaaggtggcggagcggttgctcagccgagcgctcgtgttggtgaaagtctgagcctgagagagcctgctgtgagtcgagcgttgacgccgcgcaggacttctgagactgcgactgcaacttctcagccgcaaggtgttaagccggagccaactgctgcggatctccgcagtggccaagccgagggtggtgcactgagcgtgctgggaagccgagcgatgcagctgcgagatcaaggtgctgctgggactgggacaggcccggtccagttcagctttattccggagctggatacgtcggagcgtcaactggtggcggagcctggtcaagttcactctggccggaccaacgcccctaccagaggctgagagaagtccccgaaggagcggaagctgacagccgcgccttggcccagctgtccgagctgtccgaggttgagatgctcgcgtacggccgaactcagttcgagatgtggatgtctgtgcctgctggagtcgtgcacccggtggatgtggcctattcgccatgtcatggaggctgcgatctctggggtttcatccgagcggctggagctacggccagacacttgatgtctgtgactcggtcgcccgctgcgagatggctgaacgtgttccacgctgaacgtcgacggagccctgtcgtctccgacctgaaggcagtgcgcgtggcactgagactgatgccgcccattgcatgcgtcgctctgttgcagacgatgctgcatgaagctggctatgagttcctgaaccaagtctcagtgtggcacacgctgtctgaagtcgccggagtcccggattcgcagatccggtttgagatctagcgcatcgcccgattcctcggagctgagctcagagcctggaaggctgcggtcggttcaaccccatactacgtgaggccgacctcagaccctccgctgatggccgctcaagctgccgagacccaagttggattccctctggacaaggatggagacgcgatcatggatgaggatactcagctgttcctgggacctgaagtcgtgatgcgccttcagctcactggtctcagacctctgagtccgacctcaagtgtcgaaggcgagccgtctcgaaagcgtgcattgctgacgaggtcttctgctagtggctcaatcctgagctaccacgagtctggcgaagctcctgctgagactgcgctcggattccgaaatgaccaagtgcccagcatggttggtgcaagctctggttccgacatgtctttgatggtcacggatgaagggggaaacctgtttggattaagttcctctggttcctctctgatgtctatgactgactacatggttgggactgggacgcacatgcccatgtcgacggcgacggtgatgcgaggctcagctacgacgatgtcccgcggttcattcccgggaatgacgatctcggtcacgcctcagcttactcaggctggtcccgtaccggccagagctgagcaggggctgtatcgacctgagcatccagcccagataccgctgcccggcagtcctgagtccaagcgttcagccccgaaacaagctgagacccgacaagtgcggcccacgggattccggttcacacatccatcagtaatcggttccgctgggacgacgacttcggatgacttgccctcagtcgagcgagactaccggcgagcccttcaacagagtgaagctactgcctgggcccgccttgatgcagagcagaaccaacgccgagcccttgaagcacgattgagcgccgctctgaccgacaaccaggcggagcgagcccgactgcaggaggagtaccggaaacttcaagcgaccaacgttcggatgtctgaggcccaacaacaggctaagacggagcagcagaagcagcttgaagccttggagaagctggaccagcgccgcgccgccgaagaagctgataagcacaaggcggccgaggttcgagctcagcaactgctccaagtccagaaggcgctccaagaggctgaggttagggctatgcaagctgaacagcggaaggcgcaggaagaacgagctgccgagatcaagaccgagcacgagctggaactgctaaggctgaaagagaagcatgcccaagcagaggcagagcacgagcggaccatgcaggagcaggaggagaagacccgccagctccttgcagcccaggagcagcccagtctatatcctggccccgccgcttcgactgctggacgtgtgccaatgccagcggacccaccggtcccagcacctgtcgtgtcggctcgatcgccgaccgatccggtcctggcgcagttagcccagctcacgagcgtgatgcagcagttagtccaggccaaccaagtcaagcctgaggtggctggtatgagccgcggtgctggcaagacccaaggttcggccaagcgtgctgagaccaagtctaagcctcgtgcatcaagcgcgacgtctggcgcgaagggcaaggctcgggcgaccaagcccggcaggcccggaggctcggacgaggacgactctgactcagatgactcaagctcgagtgactcgtcgcaagatgagctcgaaggacagtttggtgctgtggcgcagcccaagggaactgataccagttccggaactcgtgtggtcgttcaagcgatgattccccatgatgctttggagaagttcgacgagaagggaccgctggaggaccgagtcaactggtgggagaggttcatgtactacgctacgatggccccctgggacgagaagacccgggtggtccacctacgcgtgagactcactggttccctcaaggattggtgcgctcagctaccggatgacgttcgctcggactggaagaagttgtctcacgtcttcaagaaggaatggtgccgtacgctgagctccaaggctgagcggtactactcgatggagatgaaggactccgatacacctcggatgttcttctaccgtctgaaccatgccgccaagaaggctgggatcccgtatctgagaccgaccgtcgatcgagaggctcacatccgacgttttatcaaggctttgaccgactcaaggctgaggactactcttcagggacagcgtttcgatactttggatgaattggagaaaatcctgaagaggatcgaggctctccgccaagacgagggctatgagcagaagcggcacccagcgcaaggacttcagtttggacgtttcaaacctccacagcgtcgagctgagggacgtgcattcaaggcggaaggtgtggaagttgacccaagtctgggacgacatgcacatttccaggatgactacgacctgaagtacgaggctgattctgaagaagatgtggaccgctcagctgagcgaaccgtgtcttcgactgtccccgcgccagctcctgctgctgcaagctcagcccaggctgagcccagtcgctctacctccctgaccgatgaagaaatttgccgagtcgctgagagattggcctggaagccgatcgctcagcgctatgaccgtggaggagaccagcacccagagcagaaatgtgacgaatgtggcagtcgtaaccacccgactgacaagtgctggagccgacttatctgtgggcgatgccacgatgagggccacccgacccaattctgtaggcgtcagccgtgttcgaagtgtggcgaataccatcgccggggtttgtgcgatatgtggtcggcactcaaggcggtacgcgaagcaatccgtaccggaggctcggtcgagggcctcgctcctgaggtaatccaagctctgttcgatagcccagagctccgagagaagtcgttaaaccactaggctcgctggttgggagaccagtgcgtgacgagcctagatcccaagcgctctgtgcctttgcatatgtgggcccagcccttccatgttggcgcagagataaccccgaatgtacatcttcttatcatgaagctggtgtttacactttcgatactgacctcaacacgctggacccggaggataaaatggagaaccatcttgagtttgctctgactccgggcgagaagtatggttggtggagtgaacacacgctgactggcgagaagcggaagatggcgatggtgcacggagcaatcttccatcaccaaccgcagatactagtggatactggagctacgacaagcattttgggcttggatcttgcacgcagattgaagctcaagctacgccgtggttttaggctcagagtaactggaatgggagatgctccgacctacattaccgcccaagctaagatcaagctgacgctgggagtgcgcgtggtgtacgttatggatgtctgggttggcaacattgattgtcttctcggagtggactttatggtggcagctggagtgtggctctgcgctcgtgaaggcgttgtgaggctgccggacgaagaatctctgttgttggttggaggacctgagatcgatcatgacgggctggaagtcagcgtctggttgaatgagactgcttaccactaccctgggcaatctgtgatagtcccggtcaagtatcaccaagcagagaaggtaattccctgggctgggctcggtgatcagtgggttacgcagttcatctatggacctgggcggaggccgaaggctgtcaaagtggtcaacatctcagagcgagaagtcatgatccgccagcgcactgtggttgcttgccttgtggagaagggttacctgcccaacgggaagcggttcgcgcgaccttactcgtggaagtacagcgagtgggctcagctcatctacgaagccgagccctctccggactctctgagacgagaagaggaagcggctcggctagctgagatcaatgccccacccgctgtggagaggccagactataagcgacccatgaagctgctgctgctgctgctgaagcagtctgatgacccgaaggaagaccgagccaacatgaagcagcggagagctgaggcgtacgccaccaatacggtatcgcctgagaccgctcaagtcaagatggcccggacacatctgggacgtcctgcctcatggaagccgccgctgccgcgatcgcctcacccggatgatgtgcagtcagggacgaaccaaggaagcacatcggagggagctgacactcagtctgcgactgagccaagttcctcggagtcaagctcagctcaaacctctcctgctggaggtggtgtgaatgcccaagaagctcggaacgagctggagcgagtgctcaggactgagccgaccgacttcgtgtctgatccaattgctcatcttcaggaaacgtatgctcgttgtctcagaggtgagatcagtgaggacgccgatgaaactacggtgtacttctatgaaggcacggaattgctgaatgacctccgggaccagctcgctgctcttccggagttgaaggatcccagtccaaatgcggacctctcaacggctaacgtgggagaaccaggcgttacgactccagaaatggacgctcaagtgcggacgattctggaaagacatcatgccagttttctcggggacgggaatgcagtaccggcccctgcccgtggagttgtctgtgacttggatgttggggacgcgaagcccatcgctcagaggtctcggcaggtcccgacacacttgctcgacaaggtaattgctctgatcaagaagttgctggagactgggctcatcgagtattcgcactcagactgggcctcgccaattgtgattgtgatgaagaagaacggtgtggacatcaggctgtgcatcgactatcgactggtcaaccaactgatcaagctctcacactaccctctgcccttgattgacgacctgttgatcgggtttgaggaagcgatgtggttcctgagcttggacatggccaacgggttctgggcggtgccgatgacactccgggctaagctgatctcttcatgtgccctttggggcacttccagtggaagcgcatgccgtttggtctcaagaaagccccgctgatctaccagcagatgctcgataactgtctgtggggcttcgtgcgacttccgccctgcgaggaggtccgagttgatccctggatgtgctggatttcctaggaatcgaggtggacgactccgctaaggaggaagaaatcccgcctctgtctgaggagaataccgtgtcccggcgaaatattccggccccgcctcagctgagtcctgttctggggcggagctcctacatcgatgacatcgcgtatggagcagagacctgggaccagatgtgcgaagtcttggaccggttgctttatcgactgaggtacggggggatttcggtaggcttgcccaagagcgagtttggcaagaagtctatctcctacctctcgcacgagattggagctgagggaatccgagccaagccgaagatcgccaagggagtcaaggacttgccgttcccgtcgacgctgaaaggagtgcagtcattcctggggagtctcaattactacaacaagtttattgaggacctcccggttgtagcgtctgtgctctacgagttgacggatgagcagattcaagctggacgtgatctcggccgagctgaggaggcgtttgaaatcctgaagcagaacattgtctctaccccgctgctcagacacccggacagggagaagccgttcgtgattattctacacgctaatccctgggcagtctgtgcggtgctgggccaagagtatgacggagtaattttcccggtgcgatacactgggagggcactgcatgatcaggagctcagataccacccggctgagaaggaagtcgtagcgttgctccgggttctcagagtcttctattcgatgctgagcggatgtaagctgctgaaggtctacacccggtactctgttctgaagtgtttgttcaagtctcgatcgctggggggacgttgtgagcagtgggctgcacggctgtcgccctggcctttggaggttcaaaaggtcgaacgtgatgaagatggtttggccgcggtcatgggagttgggatcaccccccgagaccagttggacaggatcgctgagaaccttatcccagataagggacgagttgtccgagccccaccgatcagcctggagatgctggaggcgggctacgaggggtggctgctcagtttcgatggagctgccaaacgctcagaccgctctggtgcttctggttgcattctgtggaagctcccgtcctgggacgtggtcgaagctcgaggtttccactttgaaggcattacggtgaatgatgctgagtaccatggtttgctcgaaggtattcgcatggcaaaagctcgtggcatctcagaccttgtggtggtcggtgactctcggattgttattcagcaagctcagggtttgatccagtgtctgagcccaggactgcaagtgctgctggctgagttcgagacgcttcgcccagagttccagcgattgcgcttggtgcatgtgaagcgtgagtataacgcagctgcggactatctcacgtcgaatactctggtcattcaaggtcccgtcgctattgaagacccggttgaactggttcagctcaagcagctgaatcggatcccggagaagctgatcaaggtgaatgaggctgagtctgctgagcctgagacggagcaacctgacactcaagctgatgtagaagtggtggctaagccaattccactggaagatgctgccaagcccctgttgcccagcgctaagatcttcgtggtgactaggaaccaagctcgggccagggacgctgagactacagcaaccaggggcgactccgaccaaggtatcgatcctgaccagaatgctgagccccccgctgagcaagctccagtgtactcacctgaagcagcaactcctgctgcgtcaatcgttgaacgatggagacggatcctagttctgcaagaggctgagccttggacgaagaagctcaaggattatctgaatggagacttggggaacctctccgctactgaagctgaagatgtggtcaagatgatggatcagttcacccttgattcgagaggagtcctgtactatctgagtcgagctactccggtaaggcctagagacgcagttgggaatctgagattggttgtgccaacggcgctgagagatgacttgcttcagctcagccatgaggagttccaaggtggtcattaagggatcactaggaccttcgaacgactgcgcagggagtactactggccgaggatgtacgcggatctggaacgctatgtgaaggaatgtgtggattgtgtcactgccaagggagctccgcccaaccctgggccgtcgccgggaaacattttggcgactaagccctttgaggtggtctctatggacttcgttacgtatctacccaagtctgaccgtggaaatgtgttcctgctcctgttccagtgcgcattctcaggcatcatcatgtgcaagccgatgagtctaaccacagctcaagatgtcgctgaggcctacatggagtgtgtgtcccagaggtttggtgcgagctctctgctccgccatgaccgtgatccacgtttcatgagcgaggtgttcgccaggttccgcgagatgctgggaagtcggcagcgtgcgactctggcgtacagaccccaggcaaatggccagcaagagcgatcagtgcaaacagtggtccgagccatccgagcgtacgtcgctgagccagatcagagcgactgggacgaccaggtggagaagttgatgtgggctctgaacacgactttgacgccacccgtctcgacacgccgttctacctggttcacggctgggaccctcatagcactgtttcggccatgctggggccatctccgacgggcttggatcagaggactgcttatgagtggcgtcgcaagactcagcgcgagtacgagtacgctcaggcctgggctaaggatttacaagctgaggccaaggtaaaacgctcggctgctcagacaaaaatctgggctgagttgtctgaaagactcaagaaaggtttcgaagttggtgatgccgtgtggctatacctggctcgagtgcaacctgggctcacgaagaagttcgctcacctctggcacggtccgttccggattctggagacctcagatgacttccgatgcaagctgaagatcgaaggaactgggtacaagttgtatccttgggtccacataagtcgactcaagccgcgtgccctgttcccggaacgacctacagttgaggttgaagtcgctgaggatgatgatctagacgcagctctgttgcctgaggatgctgaagaacccgatgaagctcagaatgtgtacgaactggaggccatccaggatgtacgctgggttaagcggacccgaacttcacggagagtccgagagtacttggtcaagtggaaggggtatcctgacactgagtggcttcccatgtctcagctaagttgtggagctttgctgtatgagttcaacaagagcgccaaggcgaaagcacggttccaagcaatgcaagctggggatgaacctcctgagcccgatgctcaatagaggcacctcagctgtgaacctgtgtatatcgctgtgacgttctatgtgtgaacccttcgtattatgtgaatttacgactatgctacgtgatgtggagactgacttggagtttatcgtggagaacagtggatgagtgcgacgtgaacgcgcgccgaggacctgagataaatgggaaggagacgagaagtaccaaaacgagtggtgaattagaaatagcgatgaaagctcgttgcctacgctttctcagtctccttgtcttgcacggcttccagagcgcgaagcacctcagcaagcgtgtcgtggttgtactccggtgctgggataattgggttcgcctcccgctcggctctgctcttggacttgagctcaggcgggacgatcgcttcaaactgcttgtccgagcggcgggtagcccattgcgtgcgaactggttcttgaccgtccagggtgaagagttggtcagccagcgagatcttgagatctgggtctcggagaatccagtggcacggatcattgggcacagcccagagtccgggctcgaaccagatccggtccgagtaacccttaacgcccctgagctggtcgatcaagtccctgcgacgaagctcgaactcttgggcgcggtccttgcgctctcggtagacggtggccagctcaggcaggcccagttccttggcgagctgaacgtagtcgatcttggacgggaacggataccagtggagtcgctcccaatacgctcgacgccaagcactcataaacccagcaattacaacgaccgcttcgcacatctcaggagtgatttccgcatgcgtgtggtagacgaggaagtcaactcggccatcccacatgtcgtcccaggggtctgatctgagcagctccagataatacgcgtactcgatgcgattgtggagctgctcgatcccagtcttggatggcatgtaagctgggaaaccaatcgtctgatggtgcagcttctggactcggatgccgttgtgaaaccagctgcctttcttgggggccttgatgatgccattatcgacaccctcctcaggagtctcagcatcgtctggctcagggtcagctgaggtcacggaggtccctgaggctgagcgctggcgcttggtcactgagctgcccccagaagacgtcgaactccgctgtcgcttcttgtctgctggagaactctgagatctggtgctgatggagctgggagccttggccttcgacccgtagtaactctggtcaccgtcgctgtcatcggtgtcctctgaggatagtacagacatgaacgaggaatccgagtcatagtcgcttgcgcttggtttcttgggcagggtccgccagggcgctgggattcttgtcaggccgggagccgggagtctggtcacagctgcatcgaagtacttgtcggggacatactgcatccacggagtgtcgtccagagcctcccagtacatccgtgaagtcaacatgtagatcaagttcttcttgccgaactggtcgtggagcatctggtccttctgggcttcatccaccgcatcccagaacgccacgcgagccaacatgagctcttggacgtcggggcgagtgccatcccagctgaactggttgggcacagcctttgctgcgtccaggtccgaacgagcgctgggagattccttcttggcgttcttgcgctcaggcttgaacttggtcgggcggcgaggcagcgcaattcgctgtgtgaacggcttgatcatcggtgccttggcctttggtgggctggaagctgagcgagtcaagtccacggtctccggcgcggctgctgagctgggcgcagtgctcgtctagatcttcagtccccgagctttcttcgaactgcttggagccaaggccttagccaaaggcagcgacttgcgcgccttgcgttggattttgctggacccggcagaagttgacctgcccaagctgaccatcggcggcgtacgcaatggggttgccggcagagatgagctggtcggagtcgtgatcgcttgagcggatcccggaggcgaagaggctggcgccgaagcagcgctgggctgagcagcttgggtcgtatatggctcagagtcctcgaagcccagatcgcgagccgagacttggattgtggtgcgatagctggcaggagcaggtttcccagttcgatacgactgcaggagctcgagaagccgacgccagttgcctttgaaggcgctgctgttgaacaggaagtcacagagagctccgggatcgaatgctctggagtcatggatctgtgcctcgagctcagcgatgcgcttctgtgcccaaggagctcagactcgagcgaggaaatctcgtggttgatacctccagagcgtcctccgcctcgcccttttctctggcatactgagaccgcagcttgaacgtcttgtccaagtcgtccttgagcttctggatctcggccgcagcagtaatgtctgtgagtcgacctccggtaacaccagctgaggcgccagctgcggcggcctgaagcgccacggtatgtgtcatgtgaaggcgctgcagctcagctttatgaacgtcgctctggcgcttgagagcttgagccatctgctggcaccggacagtcagcccggccaccccggaagtcgacgcgtcacccgagctctgctgctcaagggcttggatgaactgcacggtgtggtggaggtactggacggtcctgagcgaccgagaagcaagctgatccgcgccgtagctctgagcgagcgggatcatttcgcgatccaaggccgctctgatccgggggtccgtgatgtcaggggaggagctgagcgaggctgtaataagtcgcccgcagcatcccgacccatgagagcgctcaagcggtcgagctcaggtgtggaaagctgaggaacttacagcacacaacccagcccatcagcagcaccagcgataagagcgccgtcacgaaggtcatcgatcgtggccggcattaccactacaccaggccgtgtgagctggtgtcaaggtgtgaggcacggctcgtacggtaggcgctgactggggtccgtctgatagcgcgatgcctcgacggcgtgaagcaatccagaaatggtgctggttgccggtgcgctctgcgtggtggcctgggccgtctgcagcgcgctgagcgacggcatcgcaggcgttggacgaagcacgagcaccgtggcgtcgcccgaaatcgccggaaccatcgtagtggccaccggagccgtcgtagtcactgctgaagacgccggagtgccgctgggagctgccgacacggtgcacgtagcagcaggccgtagctgtgctcgtggtacttggtggcgccgaggacgtgcccgatgaggttgccgccgtcgttgccggcgaaatggaggacgtggacgccgcgggcgcgctctgcgcagccactggcggcgctgacgacatcgcgagcagtttctgcagcgacgcggaggtcgcgggcgtggcggaagcagccaacggcgtgctggacgaggcctggagcgttgcgggagccgagggggcgccctgcgacgctgggtcttgatttacgctgcccgcgggcggcgcgtcggactgctgcgagtcggtcatgcgtggcgtgaggcagcggaagtggcggatgcggacgagaagaggtggatggccgcggaagcgcagcacttgctggtgctgcagttgccactgcggtctctgcgctcgactggaatttcgcaaatggcttgggattacactccacaagttcggcaagatcggacggttgtgggacgaggtagtgcgggacatctgggttatgggcaccggatccaagtcggaaatgacctccgtgaacccggcactcataagggacggttgtgaaaagtctcggtggatttcgccaccgaacccatgtccagctgacccgtatcaatccaggatgctgacccgtatcaatcaagcagatttcaagtgcgttatggccgcgatggatctggaccaccaactgtcggacatgagccgtgcgacgaaggaagctgagcccgaggtctgggcggagctccgctcagactctgggcttgagcgaagattgtctgagacccgagatgtctggtgttgggtatcccaagtctgagctgagtccaggaagcagagagaagctacgcggagtttgagctgagcctcgagtgtgatgaccggagtccccgctcaggtcgaggagctgagcggagccgggtggagtttgaactcaacctccccagcggttgtggagccgtcgtccaagatgccgagatgagtcgaggagcaggcgtccgagcgaggtcgtgccgagcccggcccagcttttactgtggtcatggagctttcacccaagtcgacaagctgggcgaggatcgaaggtctgagcggggtgacgtggagtccaagcccggcctcgaatgcgatgtttgaagtctttgctcaagtcgagaagccgagcggagtggcatgggcctgagtggagttgtcggagtccagttgaagtgccgggtgaagagtcgctgaacttaagtccagacagtggtactgacggcgaagttggtggcaccggcgagtacactcatccggtgaatcagccatgagccagcctacattgggtgcgaccgcccaagatcgcggacacttcaagcggatctcaacggcctccagcggctccaagacgacgcccgccgacgtggagccgccgcattggccaagaccaaggatatcgggcggatcttcaagggcgcccggtaagcatacagccgatgctcttcgcgcagccagtcagtgtggatattgagcccccacttagtgagtcctagtttgtgcatgtgtaaacagttaaacagagttcgttttgccccgacggacgcaagtggtggaggtctttggccagaaggtgtcttggcgatcatccacacaattcaagctaacatatcaacgttgtcagagtgcttcggtgcgacgacagtacggttatttcatattactgttacatcttagggtgtatttcatattttcgggtggaaggtgatccattctgaggtttaggcagggtaattgtattgtgtgcttggggacattggcgtgccccggtgcattgtgtgattattagtatcggttcattgtggacctggtgcgcgggtagtcccagggtgtgtgtgagtgccttggattcgaactaggctcaaaccgagtcactaactccagaccgggtcgttgcttgactcgaagagaagaaaggagaagctggtacgagcctcgcccaggttcagagaaataaaggcgaactcggcccagacccaggccgaccgggaaagaaggggtgttgtggttctgagccggaaccaaagagaggaagtggaggctatattgtgtgtggtgttgtgttcattaaggaaaacccggggcatttcgggctgtggacacgtgcggactgggactcgccaagtggggagcgagtttcgtctgggaacacctccggagaccttcaacatcgacagcagctggtgtggccgacgcgagtctgggccctcagcgtagccgtgatcaaaagaaccgccaaggggatcgcagagtgaggaacacacgcctcacccgacccgagtcggagctgagccaagcgttcaagcggctaagcctagcgaagcggagtgggagtgttcgctcagtggaaggagctgagcggaactctttcagcactaagcagggctgagtcaagtggtgcaagggctgagcgaagacctcggtcgagcggtttagcaacctgagcaaagagcacgggcgcttcgtcacacaccgccatgccctacgcccccgccaacgtcatgcccgaggccaccgacatgctcgacccccccccccccccccgccatgcctgttgcccgaggccgccgccatgcccgaatccgacgccacgcccgaggccgccgacattctcgacccggacgccgtgccccaggaccccatcatggccgtctccgccatcacagtcaatgtcatccgggacgccagcatggacgccatggatgtgacctacgatatgaccggcgccgtcgccatgctggcgcccccaacaagttcgaaatggtcaatatgcccgcatccccactcggacggccatacacacggttttgagcaagccccaatgtactcaatgctcccgttccagtatgaccggtactcttgtggccctcgactagcctggcacggacgcgatatccgtggcccccaactaggccgactcgaacttcatgaccccgtgccccgtccgcccgacgaagacgccatgtcgattcgctatcagcgcaacatgctggcgatcgaatgagtttcgtgccattttgagctaatatttagattttcggagtgacagaacaatatacccacttgtttgcatgatctatactgaaaccaagacaaacatctcaatgttgtcatatcggagttaataacgacataaagtccatacaaaacctagtcaaacatatcaatatctcctcatgacaatcactgtattcaaatcaagacaggcgtgtcaatgttgccaagtcggcgaagcaacgttgacaaggttgaccatacaaaagtcaatacacataaccacctggccacaatcaacgctgctccattagctcacaccaaaccgaaataaaatttgtttccattgtcttcagatcgagtcttctttatagataagcggcgagatatgtaaatcctcaacgtcatgttattattttcgtgtggtctctagcagagctgctggcacaacagttttgcccgggtgtgtccaacgccatagaccggaagaagcaccgtgggcggatccatctctggatctctacgttagccgccaacatcagcggcggtacgatgggatacccaccacctccaacacaaccaaatgtagtatttgcctggtcaatacaagaagcttaagaccatccgcgctgcgtatgtgcctagcaaattcccggtgatcacatctacaagctctcagcgcctcataaacgccatgcgtctaggaaaaggtatgatcttcttccccatctgctcacgcgtaaagtacttcgtgaaagtatgggcagcattgtccacagtacgacgccaacccaagacaagcccataccacatggggccttagtcgagacttgcaaacatgcaccaataggtatgagcctgtgagcgccaaatacagaggctgtatggccacattactggcgatgataatccggggtgcacccctcgctatttttcagaaatttacattaggttgaagcgctaaaatgtagcgctcacgttgcactttcaaacgtaaaaccacgcatgatacccaatcaaggcgcgaacgagttcgcgcgcgcgaatcgacctaccgcgcacgaaatccgcgaagcaatttgattggccagaaccaagtcagcgggatctcgaaaggtcgccacgcccgtatggcttgaaacggcactttcccccgagatttttcttatcccagcaaaatcgggataacggtcgccggtgggttaagcgcgggcacagaactctcgagaatacactcttcacaacggcgaaagatccgacggcaacactcggcaacgcgcgccgagcgacgatggcgatgtcgagctcaagcgacggagacggcgggcggccgacgctgaacccggcgccgtcgctcgtgtcggcgccccacgcgatggaccacgagctcaagcctgcgagctctacagcctccaaggagccgaagaaccggaatagatcggcacgatgaagcagtacttcacacggtaccgcgcagtgaagaacaaggggaccagccacgcctacacgcacgacgctctccagtgttcgtggtgcgccttcattcgtcactggaacgcgagtcgacgcgaagggcgtccgttcgcgtcgtggctcgaagcgcgggaggagcggcgaggcgagcactccatgacggatcttcgggagagcatttgctgcatggcagagcgcgagtggcgcctctgctacgttcatcttgtcgaaggttgcgagaactgcgcagcgacctgtgatcggccgacgcgggatcaatgggagaaccaggtgcggacttggcctctttcggaagacgagcggcgctggatcgatcgttacgagcgctcgcgctcggagctggagcaagcgcgcctacaccgtggacgtgagcgctctcgaagccgtgatcgtcatgatagtcgcggccgaaaccgccgcgacccttcgccggagtttcgtcgcagccgcagtcgtgatcgagggtggccttcggctggggcacgcgagcgcagtcgctcgcgaggacgcggttctccagcgcgtcatcgttcgtcttcgccagcgcgagtgtggcctcatactcgcgcacaacatccgggatatcctgcagcaggcgactacgtggctcccacgtatcctccgctggcgaatatcccagtcagcggacgcgatagtgcttctcaggggtacgcgcgtggcttctcttcggcttcgacggcgcatcactatcgcgaggaccttccgcgcgactccggcggacgtcatggtctacgattcgctcggtaatccagcgctgatcgccagctgcgttaatcagcgggggtggaccatcgcgacggtagggcgaaacatgggggggcgaaacgtcgcgcgcgacccttcgactcgaacagccgccggtttcgtcggtttcgtcggccacgtcaactcatcagctacttgcgcgctcggatcctgctgcgtctgtgccgcgggtgacgatcgagcagtaccggataatgatagccgaggcggagcaggtccggaacgacgcgctggacgcgcagaaccttgcggagagcgctcgcactcgggcgagcgcggccgaggcagtggcggaagagtctcagcgtgatcgactcgcgctggtggagcgcctccgtcgtttggagagggctgcattcggggcaccgcaggcggaacagtctgcgcatgagcgtcagggacttgggctaagctggcgtcagcgtcgacgtcatgggggatcggactacaagcccgcccgcggcactgaggacgggagtcggggacaacagcaggaagatacggtttgaggcgcccgacgtagaacgtcgggtggagacgcatagcagtcggtatgtctagcgtgtagccgtctcccagcattttgataaccttgaatggaccgatgtatcttggcgccagcttgttcgcgccaaggtttgtaattgctgtcgattggattccggtggttgacagcaggactcggtctcttttgcggaagaagctcgtgttcttccggcctcgctggtctgcgtactctttctgcttgtccacagcagactgcagcgcatcacgcacgaatctcgtgatggcttgacgacgcagcatgaactccgataccgctgcggagtcgatcggcgaatcagcttcgcgtggggcgaagttggccaccggtgacccggcagggtcagatgcgggcgcagtgtcggtcgatcttctagccttcgaacgcgtccttgatgcaattccacacatggcatccgttgccgtaaccggtatttccgcgcccactggttctgttaccggtggaactgacgccacagtgctgctgctattccctcgcggctcggctgcactcgacactagtgccgggcggttcggcactgcatccattccacccccaccaagagtggagcgcgcggagccggacgaaggcgagcgtcgctggaacgcgcaattgccgcgcgttgttgataagaacggcgtcaaacctgtcgacgcatggactgcgttgttgatagcgaactcagcgagcggcaggaacgtactccacgacggaaacgacgtggcgtagctgcgaaggacatcttcaacgactcgattgaagcgctccgtttgcccatccgtttcaggatgagctgccgtcgacatcaacaagcgcgtgccaagcagttcgaacaatcgatcccagaaggtcgatgcgaagcgagggtcgcggtcagagacgatggattccggcaggccatgatgccggaatacgaggtcgaggaacagggacgcagtcgcctcagatgtcacttgggcttcgacaggagcaagacagaccatcttgctgaagcgatcgacgatgacaagggcgcccgtgcggccgtggtcgtccgatggaaggccgaatacgaagtccatgctgacagatcgccacgtttccgtggcgataggcaacgggcgcagcggagcttgtcatgatggagctcgcttggcgcgctggcaagtctcgcaagtccgaacccatttgcgaatccacttgtacatccgaggccaatataagtccctcgagatcgccgcgaacgtcttctcgcggcctaagtggccacccactggagcgtcatgatactcgtggacgagacgagcacgaaggtcgtcatcggcggggatgacgacgcgcggaggatcgaaggcgtccattgtgtatgtcagcaatgggccatcgagctggtatcgctcgatgtgactgcgcgtagggcgtgtcagcttcttcaataactctgcactcggagtacggaggtgcgcaatgatgttggcgtagaaaggatcgtgtccgtacgcatcagcaatctgctggcgcagtggcaggactggagttgtaaccgtagcgttgatacccagagcgatgcaacatgcgcagccttcatcttcgtcatcgtcgtcagcaagttgctgaccgactagtcgtcgtaggtcgtagtctggtcggcgggacagcgcgtcggctaggatgttgttcttgccgggcttgtagtgcaccacgaaattgtattcggctgtggtgtggtaattccactaaaatcctcctctaccaaaaggtattagagacaccaacaacacgctaacccgcaaaggtaagcgcttattggatcaaaacctgaagaccaggaacgatcccttacaccgggtcggtttcaagcgcctctgtgcaccttagattggcttcggttaacccaaaaacctgtaccactagccacgagctaaggctaggatactatgtagcgctttcgcgcaaccccactgcagtccctcagaaaggaagggtaccggcgtgttaggccttatacagggggaccaaggtaaaacctcggtaggtagactaatacactcagggatactctaatcccacaaatatataccgaacgatactctaataccgttcctgcctctccggccacgccaactcttggcgctgccaaggaaactctcggtcaatgcacgataagctccccgacaggcatcgacacgcagccgagtgtgtccaggcactacaataagctagctacacttaccgaagtcggacttgacccttgttggctttgggggaagactgtctttttattactgagttttctgaggccctggggggctcgttctggccatcctatgatgagtcctatgtccctatacaaatatctagtgtgaacgatcgcaataaggcgattccggacacatcaaatgacgaccgcggctacactaataagtgcggccgaagtacgtaactaaatgcatctgtacctaaaagtgggtaccatgaagcctcgttcggggttctattaggccccgacgaggcttcggccactgcctgtcactctaccgaggataatgtcatcatccaatcagaagcagccatctccgtctctcgcttgacctcgccttgatcgccccttgattgaacttgattgtcgggctggcgggtcaacaacgttggaaactgccactttccaataccacaactgcccccgcctcgacgcgagcctcccacgctggtgagcgtctaggcgtgttcagttcttcgactccatggctcctccgtcgcgtgcattcgccgacgcggctgccgctgctcttcgggctctccagtgctccggaccggtacgttcatcgctcccgctgctcctcactgtaattcggaccctcgttgttgactccatctctttcttgatcatctcagggagctgttgatgtcgccaccgacacttcgggtcgtcgtccggcgcgccaggctcgttcggcgcgtgcccccgcccctatcgccgctggtgctgtgcccccagccccggccgcgcctgcaggtgaccctacgctcattcctgccgcctccgggacctcggttgaccctccaccggctcctccaagtaatcctgagtctgctgctggggcgaccgagactccctcgccggcagttcccagtgaagaggctcccgactcgccgccgacaccgccgccaagcgccagcgctccaccgtcgccaactcccgcgccttcggtcacgttggaaactcgcggggcgtcggtggggggcgaggcagctgtagggggtcgcgccggtgctggtgctggcccggccgaggttcctccgacagcggtcgtcttgggcgagcagcagatgctggaactcgctcgtctcgtcgtggatgttgcccgttcacctccagctcgagtcaacgctgctctcgaccacagcctgcaagctgctactaacgtcggtgaggtgctggctgccgccgttgctcctccgcgtctccctcttgcgaaggctgatgaactggtggccctccgccgcgagaacgaccggctgcaggcagagctctccgacgccaaagataaactcgctgaagagatgaacctgcggaccaagtcggactacttcctcgtctcggccaactccgagtgcgaccaagctctggacctcgtccaggacatgcgcgtccagctcagcaacgccagcgctcagttgatgcaagcgaacgcggccatcgctcaccacgctgacgtcactcagtcgttggagaagcggacgctcgttgctgaggccgattcggccgctgctgtacgtcggaacacccagctccacgagcgtataagtgcaagcctcgttacctacaacactcagttggagaggcttcggaagcagttggccgaccgcgaccgagcaaacgtcatccccgcacgcattcaagcgttgacggacgagaacaacagcttgcggcgagcgatttctatccttcgtcggcactcggccgcacacggactcgacgtcgacaccttggccctggcctcagccggcatctccgccgcagagattgattggaatcttctcgggctgtccccaccgacggtcactgtcgagagttgacgccatgacgaatcctcgtcagaggagggagaggagtccaagacgaccgacgtgccgatggctgagtccaccgaggctacgtccgctttcgctgcttcggtgggcgcttctgctggttccccggtcgtcatcgcgcaagcggggtcggcaaaccgagtctgcttccgtcgggaatacggcatcccagtctcctcctcacaaacgcttcggcagaccgtcagtcgacctgagggccagggctgcagcggccgccgcgccatctagtcctcgttcggcatcaggagagatttccccgcctcctcggtcgatggtgcgtccaacgacggctcgctcaagctggttggagtctcagcctctcccgtacgaacactcagacgtccccttgtatcctcggctggcccgtcgcgcctcgcctccctcgccagccccagcccagcagcaggaatcgtctgacgtggagtttggagggggtatgagtcctagcgacacttcacaagatgaccttgagcccggcgagattccgggggtgtcggccagcgctcagggtgttcaaggttctgctaccaagccttccggtactgtcatcgaggttccatccgaggtttcgccttcggcggcgactaccattccttcgccagtctcgtctggtacagccggcgtcggccgtgcccctcgagaatcggctgctggggtcaccgagggctctggcggcccgccagaccgttcacctagcggtgagtcgcctcatgagtccgagacttccgaggaccgcgcagcgttgttcctggagatgttcggccccgacgaaagagaggaaacctcggtggcgcaacctgtcgctccttcggaggctccttctcctctggctgccgcgaccggggttcctgtagcttcacaagcggccaccgtgccactcccgagtcgactccacactcggtcggcctctgttcacgctcgggcgatggtaacagcaacggtgacagcttcaccgagggctggacctgcgtcgattgccccagcagtggttgacgcttccgacgtagctcctggatcgcgtaagctcagtggtcttgctaccctccgcgtttcacggcacccggagcgtcggaatgctggcatctcatccaaaacgccagtgtccccctcgtcttcgaggacgacttggtcgcccccagttcagtggatggaatcgtggagtttggcttgtggacggatcctgctcaccccttccaagtgttgcgccagcgtttcccagacgagccttgtttgatcgatacgacgggttttccatcctcggtggctatatcccgtcgtgcaactggtcgggctcttctcgttcgcctatggcggcagttccaggggtactcctaccactccaccaagaggggcgaccttggtttcgccttgtgggagcgtcgccactggattaggggtaaagcggtcaaggcgtatatcgacaacctcgccagcaccctcggtcagcgcaacgtgcaagtcctagcgcttcgacaagcgtggtccaagtaccaccgagagcgcagttatcgtgcagatcgcttgcgagaccagatgctccacaaggtgtggaatggggccattacgtacgacggacaacctccacagcaccgcaccgaggttttgctggagccgtcgtacctgtaatactcgttcgaggtgatggagtgggtccccactaccgacgactgggcctccgaggtggcggacgtgaatgcccgcgagccgtggcgtaactgtcggttccaagggccggcagaccacccctacaacacggctttcgccccttgcaacgacgtcccgttgtttgtccccaacggatcgactcgggaaaccgtggcgtcgtcggtcgtggtcgaatcttctctgtagacttcgatggtggtcgttccatgggtggccgagttcgcaaacgctcgtcgttctcgctctccaagccccgatgaggagacgcagaagtcgggtgaagcttctagcgccgccgggtcaagtctgggcgtgttggctcaggctgtgatggagatttagcctcgttaggccccgctccagcttcaccgtttcgttcacgttcttttccaatgtcgaccgaggtccgtggcgctttaggtgacgctgcatgtgctatcccaatccaaaataacgtcatgttgttcgttccatttcgtaatcttttctcgcgtcaacgcacatcgcattcaatactcggtcgcggttcccagagcttcttctctgccctcgaccgctgtggctgcctcaaacgaggcttggttcgtagctgcggcagccgggcttcgtctcttctccctgcaagaagatcgggcttatgctcgttgaagaccggacttgattcgcgggagaccgtgcgtacttacgctagctccgttgcgggtatgttttcgcatgacagcccaattttgacaactgtacacccggtctgctgcggatatccggtgtcgacagcttgcatacccatttcatcatcaactccatactcaaccacgaattcgagcgcacttgttcgtgctacttccatggcaatcactgcgtccgaagcctcggtcgccctcccatttgcttcatcatcacttgtttcgtctgttgagggtttgaccgaggcttgcttgcgtcttccgttgttcctggctccattccgatatctccattccatcgtgactcgttcacttaacacgtaacatgcagattccagtaactttcttcgtctgtcactgcgagctggatagccctcgcaggcagttcaatcatcatctccagtagcctcgttcgtctgacatcgcgggctggattgcccgcgcgagcagttcaatcctcgttggggcgcagaattactcctcgtcggccacctggaccatttgcaaacgtcggtcgcttcgcttccggcgtaggtaatcgtacaggaggccaccgcacgagagattggacgctggttcccatgtcggctcgtcatagccgacccacttcaccttgaactctcggacggcccggtgagtgctcgttgacaacggtgtccggtcatcgaggatagcctcgacttcatactcaccgtccaggtggtccggctcaaaactgtcttcaggcagtagttcctcgtcgaagtcaagacgagtgtcttcggtgaccccacgagccaaacgaaccctcggtcggccttcgaattcgtccactgacttgagtcgtgaaacatgcaccaccaggtagaaccggtatccacttcggtcgggtaattccaactcatacgcaaactcgtcgaccttcttcttctcgcggaacggtccgtgccaccgatgggctagtttcttggtcagtcctggtcgaacccgttccatgtacagccacactctgctcccaggctgcaaagaaagcctcgttctcgtcactgtagctccaccatggtcaggggaactcgatgctcggtcgaccgaggttctattctcgccgacgcctgccgtagctccttctccttccttccaagtgatgcattgtgctcttcagctctccgagcctattccgcggcttggtactccttggccatcctcagggccgtttcctgctgtcggttgacctctcggcgccatgctagcgcgtcagtttgacaaccgaagcctcgtttgagtgacgaggacattgccttgagcgtcgactgtgcatcccacccatgaacgaggtaaaatggagtttccttcctcgtcgtatcacgggagttattgatggcgaagatcagtctttcggcgatctcgtcccaatcctgctgcaatgggtcttcagcgtatacgcggactgactgcatgatcgtcttcaccgatctctcctgctggccgttggcctgcgggcggtagatcagggtcgctctcgaccgagactgcatcatttccgcgaaggcgtggaagacctcgctcataaatcgaggatctcggtcatgacggatcaaggacggtgctccaaaacgtcggtagacacactcctcaaaagcttgcgcaacgaataaggcggtagtgtcagacatggctttgcccatcacgaatcccgtgaacgagcattggaacagcaggagagccgtgttgccacggcgactcttcggtagcggtatcacgaagtccatagagactagttggaaggacctctcggctagaatgttccctggcgagtacccgcggaactgaggtcggctcttacttgtactgcaatcagggcacgccttaacgagtttcaccacatcggcatactggccgatccagtaatagtctctcgccgctcgatgtagcctacgggtaataccttgatgaccgccttcaagtgagtcatgacagctttgcaggacctcttggatcattgttgtgggcaccacgagtctcatcttcaactcggcttgctcgccgtcacttgaacgacggctcgttcttgtgtaatatagcacatcgtcctcgctcaacacaaattggtccgccattttccatgcatctcgtgctgctctgtatccaatcttcgcatcatctccccggagcactgccttcagattcgaccaccgtaactcttcatcttgagcggaggcgattctccttcggcgttcttcctgtactaccagcgggtcaatgtcttctgcgttcggtggggctggtgacgtctcggcacgcagcggtgaagcttctgcttcattctgagactcgttcggcacaccattggcatctactcggtgaaatgcgtctccctgatcggtgaccgagacttcatctgcaaaccggacgtgtttctcctttgctctcgtttgacgtctggtcatcacagctacgcgtccgggttcagtctcgttctgccgtctgcggtcggtttctcttcgcacaaaatcgaaaaaattcttgctacgaggtttggcagaaactaccacggcccatactgtgttggccgagggtatgtcctcgacgacgcagccgtcagcagcctcgtagatgacttcagcgatacggttcagcttcatcagctctaatactcggtcgtccgacgataccaccgtagactccttgcactcgagagtctcgcttgccagagagtcggccgcagcgttaaactctctcaccacatgcaggtacttcaccgaccgaagcttggccgtgagttcttggtggtggctgagttgttgcagcaatgactccttccgacaggctatcacccctagggcttgctggatcgcgagcctcgagtcgccaacgacaactagatcgtcggctccatgctgtaatgcagcagagacgccgttgttcatcccggtgtactcagcgaggttaaccgtggtgttctcgaggtaagcgctcgcaacaagcactactgtccactctggtagcttccatagtatccacgagcagctgccgtatccaccgttcttctcggtcttcgcagacccgtcaaacgacataacgaagcctcggtaggaccgcggtaggcgtgcgtagagcagatgcgggtccaaacgagtagttggtgaccctcgtgtccggggtgtgaccaacgccagtgacttatccaagtcaacgaagttcgtcaagccggcttgaagtagctgagcaaacgaacagtcggtttctttgactcgttcgaccaacaggtgccacggcgacagcaagacggcgaactgggtagcccgaccgaacaatgtcttggacttgtggacccagtcgagtgtcgaaaaccgagtgtagacccggattcgctgtccaacgagttgagtataacacaccttcagtatcagcagaagcgcgaggacctctttctcggccgggtgataattcatctcagcatccttcaaaacacgtccgcagaagcgaacggggtgtagtttgccctcgtgctcttgcatcaacgtggaacttagagcccactcgttggcgaacaacatgacatgcacctccttctcccggtcgaagtgtcgtagtatcggtgctgccgaaaccttctgttggagcatcgcgaagctgtgcttggccgcggtgaggtcacccccgggctggaagtcctcgtccttaagctggtacagcactgctccatagaccacgaagtcttggatgaagcgactgtaatagttcagtgccccaaggaaggactgcattcctttcctcgttgacgggaacggaaactcggtcaccccagccagcatcttatcgtccggtcggataccttctgctgagacttcgtgggacaggaagtctaccttggactgcacaaagatgctcttcgtgatgctgatactaatacggcactcttcaaaccgtgccagcaatcggcctagcgtcgccaagcacgactcgaaagtctcggcaccgaaacagatatcatccacgaatgaccggcgactgaatactggtgtcaacgaggagtcagcgggctccccgttggcgaacatgttggcgatagggctgttgaccagttcggctacagctcccttaccaagcgagttgtctcggtcggcctcgaacttggtccggaatggctttgccgtaccagtcgaagcctcgttcaccccagcatgagcttccttgtcatgttcttcagctagacgcatgcgctccgagaatttaaaccattctcccgtcggttggacgaagccccaaagcgcgttgtcaatcatgcgttgatagatcatcggtgcgttcttcaggccgaaaggcatacgcaaccattcgaagtgccccagtgcgcagacgaaagcagagatcttccgagctcgttcggtcatcataatggcccagaagccgctagcggcgtcaagcgagcaaaaccacaagtacgcctccatgtccgtcagcaagtcatccaccaagggcatggcgtactccataatctcggtgatcgcattaacgagtttgtagtcgatacacaggcggatatccaccccattcttctccaggacgatgacgattggcgacgcccatgggctgtctgagaaggagataagcccggccttcaacagacccttcaccaattcgtacagcttaccgaggaagcgaagcggggtccgccgagccttctgcttgattggcgcgtgcccctgtatattgatgtcacacacgacaccgtaggctggaggcggcagggcgttgccgctcgcaatcaagatcttctcgtggctcttaagcacatcgaccaggtccgtctgctgcttcacgctgagttcgtcactctggacgttttgccccgagtagtccagtgtcgtctctgacgcttcggttaggtccggcaagaacgccagctcttgcgcgtagtcggtaagctcaatctcgttcgcgacgtgctccgaaacgtcgttcacggtgtcatcaccttcgacagacccttctgcaaccatggcatgcatgaccgagatataggtcgcctccagtagctgctcggggtcgtcgatcgcacttagatcggaatcatggaattcagtgtcggcgtcagcggtggaggttccggcttcagtaggaacgtcgttaggccctgggtcgtgttcaccccagtcgacttcgctactacacaccgcagccgacgtttcctctggctccaggctggacgcagcggtccctgttggcaggacatcccatgtagttgtctcggccactgctaccacgtcgcggtcatcctccgaaccgtcgttcgtcacgctgtcaccatcactcagctcatcactggcttccgatgcctcaaccgaggcgtatgtcgctccctggccggtggagtcagcaccactgttcggattcacgggcaggcaacccgctcggctaggcggcgagtctccgggtacgtccgagtcatacgacgcgctggcctcgtcgtccgaaccatcgttcaacccaccagcacgatccacatcggttttatcagctcgagcgacatcgaccgagccttcactgaccttggggtcgtcgtcgtagccatgtacatcgggtgacgagtactcatcatccaacggagcttgttgacggccttctggccatggcggtgcatccggtggcctcggcaggatctttcgcggcgtcgggtaagttcggcgctcgaccgcaggcggctgttcagccaactattgctcgtagagacgacgttctcgtccttgcagagtctcatcacgactcgttgaataggccaacacctgccactctttgtacttgttagaattcaacctcgcgtagccggtctctcgcggtagttcaccatgcggtacccacagcaccacggagtcatgcttggcgcactgttccgctgtggtcgtaatattggtgagccgtatccacgtcggctgcccccgtcgaaacctcgttacggtcggcacgagcttgcctgtgcgtcgtacccacacatcgtactccgaacgaggtagccgctggcgcggcagtcgaaactctcgccactcgcgaccgggtacgtacaaatcctcgatcggctcacacgaaggctacgtgccgtaaggttcgtcatcttcagcactctgcgactttagcagtggtaccatgacctcgtccggaaggcgtgcggtgccatgaaatagatccagccggattccagccgggatcatgaagtccatcccaaggaccacatccaccccggcactgtgattcattatccacatttcaaattcgtagacctgctcccatccgagggtgatcttgacgagcgcccgtcgccgggtctccatcacccctgggttgatgccgcggacttcgagacttcgtccgtaatcccggacttctcgcacacgtagccgcttggcgaagctggcagaaatcacgctaacattcgctccagtgtcaaggagtatcctcgttcgcgcgtcgtccactgcgccattgaccaaagccctcattcgcttcctcttgtcgtatcgttgggacgaccaccaccccagtctctcaccgggcagtaatttcaccgcccgaacgaggttccgaggtggcccccttatctgggctagacttgtgatcaaagccttggtcgggtgtctatcacgttcatcatcatcatcttcatcaataccaatcgcaacgagacttgcgtcccggttctctccattttccgtcggtttcacacgttcattgttcttcaggtcgtcaggccgtttgctttcgcccgtgaacgcgaacagatagtccgcatcaacagcaggctcagctaactgtggcagcccgattgggaccaacccagtttcagttggcgggctgcctagtttaaatggcttccatacaccaggctttgcagctctaatgacagatccttcttgtcgaccttggacttcaggagcttggtgagctcgtggagtgcttcacacctcccagcgtcgtgcacctgtttgcacagtttgcaccgccggtagcagaagtgcaccgagtgggacgggcttccgcacgcggcacacggcccatactggcgtcgaccatctcgttcacggttggacgggcctcctccgttcctgaagcgtcggttatcagaccgagcgaacgttccttcggctgcggccctgcgctcagcatcgttagcagcagcgacatgtccggtagacccatccgagtcgtaatcagcgtctgaatcctcgtccgagcgttggtcgtccgagtattggcgctcatcctcgaagtaatcctcgttcgcctcagcatcacgtcggggagcgtatggagcctcgttgcgtgcaccgaccgagcctccgacgttccattccgccatcacatcggccagcgcgtcaaccaaagtgactcgggactggtacggcgatccatcgcgtcggtcacggcgacggtcgtcttcactgcggtcgttgcggcggcggttgtcacggcgacgtcgttcgcgacggtcttcgtcgtggtagcgtcgttcgcggcggtagccaccacgagaatcctcgttcgacctcgcatcgcgtcgacgtccatcatcttgactccgagagtggcggaacgacgattctcggttcgatttgcggtcacggtgacgcaggatgtcgttgatcatgtcttcgaggtcatggatgctcttgacccggacgtggcacagacggtcttctaagtttcggtcgtcacacgtgaccaagtagtggtccacgtggtccttcgcgtcacgaccaccgttttcaaattgcacaccggcgttgcgagcgtagccgttgagccggttgaggtagtcacaaacgtgttccttgtcttcccgcttggccgagtagtaccgagccttcgcagactgggaaaacttcgagcaatagtacttgatgaacgcctcgctcagcaacttccacgtgcgtcttgtcttgcgtgggagctggcgacaccagtgcagggctccatccctgagcttaagttcgaaccgcatacaccactcgttgggtggtgcatgcgttcccttcatctcatagatgaacgttcggagccactgcatggagtgctcgctcttgtcgcgcgttccgtagaacggcttgatgttggcgagaggcaaatgcgtggcgatctcgagctttggggttgagctctggttgtcggtcgcgcttagctcgcgcacctgacgtgtccattcgctcggtaggtccccttcgtagtagtcggacctgaggtcgtcgtcgctgtccgacgaatcatcttggaggtcgtaacgtcggccggaccgacgaccggtcgctccgcgcgtgccaggcgtggcgaatgaagcctcgttctccctagccagacgttcacaacggtccgtagatcgtggtgttaccatgtgcgagtcttgcatgtacggcgaggcttcgcccttagttgcaaagacaccgtcatcagtggctcccttccgaggggtcgctggtagcgggaccgtcaacgggtctactgcctccgaggtcgaacgaagcatcgttggccctcgcgaactgacgtccgccactccaaaggcattacgcagcttcttcctccacttggttaacgccgtggcagcggcggtcggcgtccaactcgcgagcgcagcctccgtggggaggatctggggttcgcaccccatagctcgcaggaggtccacagtattctgcgcaacttgccgagtgctcgttgagttgatcggcgtagccaacgcccctccgaggtccatccagatggtctggcggacttgcttcggggagaacaactgcatccattcgctcttggtcttcatcaggtctaggcaccggcctaggaccttgttggccgccggggtatccccgttgaggggaggacgagtgccaaccggcttgggggttgcccctcctaccgtcaccgagggtttgaagccctcggtggcgccgtcatccgcgtcgtaggcgggctcggggcccggcatgtccttgaacgtgtcggagaggtcgcgggtaatcgaccttgatcctccactgcgacctgtcgacccaaccgcagcttccgaagtctcggacatcgctgtccggacatcccagtcatcatcttcgtcatcttctttggcgtccgaggaatcaatcgccgtgtcgtagctcaccgaacgctcgtcaatcgactccatccgatccgtcgttggggtcgagaatgagcttccggagcgcaccgaagtctcgttgcgcgttccactcgacttggccggcgttgctggtaccgctgacttgactctcttcgccatcttctctcttcttcttcttcttcttcttcttcgcttctcttcttcttcttcttctcctcttcgctcgttgggggtaaagacctacaacaaccaagacacacagaaggtcacaccaatcccgggtcgcggcaccagttgtgctgtggtaattccactaaaatcctcctctaccaaaaggtattagagacaccaacaacacgctaacccgcaaaggtaagcgcttattggatcaaaacctgaagaccaggaacgatcccttacaccgggtcggtttcaagcgcctctgtgcagcttcggttaacccaaaaacctgtaccactagccacgagctaaggctaggatactatgtagcgctttcgcgcaaccccactgcagtccctcagaaaggaagggtaccggcgtgttaggccttatacagggggaccaaggtaaaacctcggtaggtagactaatacactcagggatactctaatcccacaaatatataccgaacgatactctaataccgttcctgcctctccggccacgccaactcttggcgctgccaaggaaactctcggtcaatgcacgataagctccccgacaggcatcgacacgcagccgagtgtgtccaggcactacaataagctagctacacttaccgaagtcggacttgacccttgttggctttgggggaagactgtctttttattactgagttttctgaggccctggggggctcgttctggccatcctatgatgagtcctatgtccctatacaaatatctagtgtgaacgatcgcaataaggcgattccggacacatcaaatgacgaccgcggctacactaataagtgcggccgaagtacgtaactaaatgcatctgtacctaaaagtgggtaccatgaagcctcgttcggggttctattaggacccgacgaggcttcggccactgcctgtcactctgccgaggataatgtcatcatccaatcagaagcagccatctccgtctctcgcttgacctcgccttgatcgccccttgattgaacttgattgtcgggctggcgggtcaacagcgttggaaactgccactttccaataccacacggcgaagaacgagagccatcgcgccatgcgctgcgataagtgtggagtcttcattgcggtgcgcagcgacgcgtggtacgtgtacacggcaaatgtctgctctccgagcaagtacacccggaatttgaccagggcgtagcgcatagcgaggagctccttgtcgtggacggggtaattcctctcggcaggcttcattcgccgtgactggtagctcacgacgcgttcgtggccctcatcgtcgaactgcatcagcgcgcagccgattgcaaaatcgctcgcgtcgcacacgacatggaacggtttcgtgtgatccggaagcatcaggatcggcgcttccgccaagctcttcttcacggaatcaaacgcagcttggtggtcgggggaccatagcaacgtcgcgtccttttccagcagcgaagacagcggttggaccagcccggcgtaattctccgtgtacttgtggagataattcgccagacccagccactgacgcagctccgtggggttcttgggagttggccaagaacagatcgaggtgaccttctccggatctgcgcgaacgccgtccttgctcacgtagcagccgagtacgggaatctccggcgcacagaagacgcacttcttcaaattcgcgtacagtttgttctcgcacatcacttggaatacctgcctcaagtgttgaagatggacctcgacagcactgaggttgccctcagcgcggctgtgcacgaagatgtcgtcgaagtagctcggcgcaaagtcgcggagcgggtgcagtacgtgagacaccatgcggttgaacgtggctggggcgttcttcagaccctgtggcatcacgagccactcccaaagcattccgctgggggtgcttactgccgtgaggggtatgtcgctggacctcatcaagatctggtagaagccgtccgtcaggtcgatggcgctatagatgacgctacctgacatggagtcgagtaccatgtccttccgcgggatcggggtctgtgccgggatggtcgcgtcgttcagcttattgagcgcgtggacgatgcgccaggcgccagtcgccttctttacacagaacgtggggctagagtgtggggaggtgctttcgcggacgtggccggccaggcggcgcttttcgaagaactcgtcgatggccttgacctggtctcgcggcagtggccactgccgcgtcacgcagtacttcgttccgggcgagaggtcgatctcgtgccgaactccgcggtcggctggaagccggcggggatctcatcagggaagacgtcttcaaactcgcgcacggtatcgtagaccgggttacccgacttcttcagcgcttcccaggactgcgctgcgaatcgctcttcgcgggcaggcttcggttcggcactcctcggccgcgacgacgtgtcgtcaccgctgagtgcgtgaagaccctcggctgtcccgccggcctcggtgattaagcacacctgctcgatgtcaccagccttcagatcgcgaaggaagtgtttccacgagagcccggggagccgagtgattccgcgagcgtcgcgaggtggactcgcgacttcgatgacccgcgtgccccgtggagcaccctccacgtattcgacagcgcagaaagattccgtcgggggaggtgcggttttagtgttgttccgtggcctgagacgccgtcgcttggatttcctcctcttcctcctcgaagacctcgagcaggagctcgaggtggacgagtcgctggcactggacgacacatcgtcgctatcgctggacgatacttcaccctcctctaggtgcggagtggcgagcccgtccgcatcggaagtacgcgggagcaccgcttgctcgaccgcctcgttgattcgcgggagcccacgtcgctcgaccgcctcgttggttcgcgggagtcgaacgcgtagttcatctcgatcaccaggaagtcgtcgttgctacggatgccgtcgaacgtgtacggcagcgtgatatcacgccgtgggacacggtgtggcttgccgtcagcgagacgacgccggggccctcgcggacggatatgtccgagggaagaagcgacaaacacgaggcgcggaagaagttgttcgttgcgcccgaatccaggagcgcacggagaggacgccgcgcgccggcgacgtgcaggctgacgatgatcattctgtggtcgccgctggtggtggtggcattgaagtgagcgtgaagcactggggggctaggagatcgggttgccaccgggggacccggacctccgttccagccagtagggcgccccgcacctactggtcccggtcggtttttggttgaacggccaggttcttgtcgtcggcgcgagcgactgcagcgtgcatcggcgcaggcgcgcggaagattgccgcgcgatgacccaacttccacaacggtggcaggtcagcgaacgggaattgcggcctccgcgcgagtagtaccgccggttattctccgcggcttcgacggcatcgatttccattggctcgggcgtcgctgcccgagcgtccgccggcaactgtcgcgagtacgaagcggataccgtagtcctcgcacaatgcgagggcgaacgcttcttccagcgacttcggctcggggcgcgtgagacaatagcgcgtcattccttctcgcatgccaaacacgaagacgtggacctgcgaagccatgtcgatgggcctcgtgatgatgcacgaggccaggtgacgagtcttctgtacgtagtcgcgcatggacagcttgccctgcttcaacacgaagaactccgcacgcatccgcgattcgtctgagggaggctcgaacgcaagtcgaaggtctgtctggagactgtccagacgcgggaaggcgtgttggtccacaacaagcttgccgagggcccactccttcgcattccccgacaaacgcgacaggaggaagttcactttcgccgtcggcgcctcgatcagtctcgaggtgatggcgatgtcgatctccctgaaccagcggttcaggggcagtcggtcttggccggcaccggaatacgtcgacgtctccatcttcaccgcatcgttccgggaggaatgcgagggagttgacactcgccgcttggcatcggcgagctcgcgttccatgaactcttgggcagcctggcgttgttggtcggcggcagctggctcagcagcgacgtgacgacgaactcgccggagactgcagcgaggcggtgaagagcttcccactcaaccgggtgaggtggggaaaactcgtgtggtcaagggttacaccggacccttcggacatcagaacttggctcatcttggccttggacgttggaaggactacaaagtgctaccaggtgtaacggggtaagagataccgtcactagcgtacactgtagataagaggaagcttgcaataataagctcaagtcttgtctttagggtaaaatcaactctgtttatgtatgggacgggggacgagggcgatgagaagcccgagtgaagcccttacccttgtgaaccactcaaatcaaagtatgcacctgattggatgaaatgggtctgtctccccactttcaaccaatcagaacatgacagcaggtcacacgctcgccgtgtgactgcacctacttttgtgtatgtacctatgtaacttctacctacttatgtaaatgggccctttacaggcagacacactcgcgtcgctgaagcagctgcgcaaggtgcacaatgcgcagccttcggccatcacgtttccaacctctgtgaaggcgaaggtcgctcggatgacacaggtcagcgagacgatcggtccattactagaggagattcggtcgtcgttgaacgcattcgcgagacctggctcgttcgagtattcgacagaggaaaaggacgaaaagggcgacgaactagttgccccatcaagttggaggcgcaaccgggacgtgtcaagacagcgatcgacacttccagcgtcatcggggcctgttcaacagtcttcggccttcatggcgtcttcacttcggaacaggccttccgaaaatacagttgccgtagctttttaagctgcatcactcataagttattccgcggacataccgaggtcagagaaataaattatcagtatattgcaacaattccaacacaagatggcaacctgtattacgtagttaaggctctactaacctaagcgttcacaaccttcgacaccgtagcggctccccaaaaacgtcgattaatcttcagaaacaacagtatctcgagacgactggggagaatgcggtggcggtgcagcgacaaaacgtggcgtgccttgctgaagagctgctccaccgcattagacatcggcgggatgaagcgcaccccacggtacacctgcgcagctacatgctgcttcttgcgggcgcgcagtgcgcgatcagcaaacccagcgcggtcgttgtcgtcttcaccggcgtcatcgctggcgcgacctgcagcacgcacagcaaatggacttagcagcttctgctcttctgacgtcagcgccgcctcgtttccgagcaacaccttgacacacgcgttctcgaacgcagggctcttcacaatagccgcatttgcggctaggtactgcgcgacgggagggtggcgctcaatcagagcgtcgaaaatatcacgcacgtccagcagcgtgacaccttcgtcgccctgcagcttcttggacgcggacttgaactcgcggaggtcgtcgccgagagcccggagtttgttttcttcgtggcgcgtcagcatgagctccgccagctcgtcatccgacgtgtcgatgaagtccatgatggcaaaaaagcgcttgaccatcttgtaagtcgagtcccaacgtgtggcttggcgcagtaccggccgcaacgaagtgtttttttctaaaaaaaaagagctaaaatacaaatcccaaaataacttaccgaagtttcgcggagtgattcaggttgcgtaatttacgcatccgctcctggatcttgcccaacaatggctcgtagtcggccataaacacttgcacagcgaggttcaggcgatgagaggcacaaccaacgagcggaatatccagcaggtccgcgagcttggtgttcactgcacagttgtcaccgacgaggtagacgacatcagagatgtctcgaccaaagaacgggaggattccttcgaggaactccacggggctcgcggaggagtggtcggtgacgtcgtcgtcgatcaaaggtgcaaacgccagtagcacattgtctgcacgaccgtcgtgctcgaaaaccgcatacaccgcgagatagtgctcggactggaaagtccacccgtcgaacatgataccgaagatgacagagagcgccaaaccgatgtcaatttcgacctgccgcacgaccaaatgggcgtacttaagcagcgtctccgacgagaggtgctccaagttcgtgtacttggccacgatgggatcctcacaccacgtgaaaggcaggttgcaggccgtggtccaatccagccagcagaagaccgtctgcgacttctggtcgatgaagctgactagggtagccgtgttggtaccgctggccatcattgtcgccacgaagtccgggtggcgcttcaggacatggtcgaacaggttactgtagccggttttgggtgcttgttttctgacgacggagcactggcaacgaaagtacgacgtcggctcatcttgagaatccgtgacggccttgtagaagtagctgcagacttggcgggtgctgaacgggttgttggttgccatcttgattcgaaaatgaggacgacactaggaaagagacaaacttggggatgctagattgttaactatggtaagggtgttctaaccagtgctttgtggcgtctagaaatgcagcggagacccagaaatgcaaaaagagtaatttcctaggaggaacgtacttatttgaaaaatgatttttacgactgaaaaatactttgtaaaaagtcaagccgtaagttattccacttttttcacggtcgcgtaaaataaattattccgtactaatatttccattgcaatcttttattcggaaggccagcttcggaacggccttccgactttcgagcgagacagacaacgtaacacgtaccctccgtttatgaggggaccgggcaacttctcaactctttctgaagattcagattccgatacgccgaggaggagctcaggatatgccacggcatctatgagatcaggaccgagcaacggcgttgtaggccaaaagcggcgcgctagtagccccccgcgtccagttggcaactcctttttgaggccgacacctcctgggcaacttctgttcccacgccccatcgaacgcgagagcatttggccacggtgtggtgaatactggatgctcaacgatcgccaaacaccacgctcgcctttgccacagtcagagaaaaagattattgatggcctcaaactgcgcttgtccaagcttccggatacagagcaggagggtgtattttccgcgagtatcaaggctgcaattgaggtcgtgcagctggagcaagtgaaggatgaagagttacgcgtcgagcaagccgttaagacggcgcatgctgccgtcaagtgcttattaaatcgaaacggcagatccccccagtcggatgagcagcagcaccgcttggaggatgtacgtcagattctactcctgtggtgcgtgctatcctcgataccaaaggaaaactcgaaggcgcaggactgcgcgatttgcatgatctcactaaaacaatcggggaagcctcgcgctttaactggtacgtgtcccgatctcggaacgcttgaattcttcgcactgaaaaatggatcatattcgctgattattgtacatcatgctcatgactgcgtaggtgcaacactcagctacgcaagttcctcacagccaagtacaagaagcctgcacagatatctgctgatgatcaaaacaagttggtctcacttgtggctgagacccgggactggcggggcataaatgactatacagtcgtaaggtttaaggaaatcatggcgtttgtgacggagatattcgacgggtcctatgaagactgggagccacaacaggattcgagagtcgcagaacttgtcggcatcatgatcgtgagtcatatcaagtgttcgagaagattctttacctcatgcgcctgatggcgaatgaggccagaataccaggaatattccaccaggtacgtgcacgatgctattctcgtgttgagctctggtcaagcgaattgatggtatgttggttctgtatatctcagcactgtcgacacgttgctctcactcttcccgtcatccaagcgaccgatgttcgaatactcgccagcgactaaatccatagatgaaagcagctatgggtccggtgaagactagtgcaaatcgtggactctcgtcttcatttacctcgtttcatctctgcatagtcttagtaataaaaagaatcgttggaggagcagtgaccgtggatccatgaactttgctgttttgtagtagaatttgcactgcatgacatgatgagtcagatactaacatgagcctaaactgctcatcgttccttttccaccgagtcaaaacggattcactccatcgagcgaacgtgttggtgacaaacggacgagtatttagaagttaccacgaaaattacaaactttggttgctacagcgcgggagaactaactagcttatgcgccgtggacggcagtgtagttgtagtacacctcgttctcgtactcgctgtcgcagtacgggaacgacgtgtccgagtccgtcggcgcgaacagcgtcttgcccgacgtgtacgtgacgtagcagcccaggaagccgcacacgacgacgacaatcagcgccgggatcttctcgtacatggggagctcgtgccacagcttcttgagcaggaaaataatgggcagcaggatactgatgagcgtgatgcacgaggcgcccacgaagtccaccatgtccgagaagtggtccttgaggagaaccgacaggacgaccagcaccacgatgatggcgacgcgcaggatcacgtacttgaccgcgttcgatccgcggtactcggcagcttccgcctccacgtcgtcgtagtacgggttctcggcgtcggcgttcgagatgtacgacatcttggacgagcggcggtcgtcggtgaccgcgtccttgccgggcgtgttggcggcggcgtacgaggcggcggcgtacgtgagggcgttctcgacgtcgtcctccttcttcttgtgcatcttgagcaccagtcgctcggcgaggtagaaggccgggttcaggatgacggagaaggcgatcgtaatgtgcagctgcatgaagaagtaggccatgacgacggcgccccagttggacttgaagcccagcgtggtgaggcccgtgtccgcgtccgggtagatggagtagagcaggttgcccgagatctggcagcccaccgccgagtacgccgtgctggccaggatcaggaagaggcacgagatgaaggccatggtgacgaacacaacgcgcggcatgcgcgtcggctcgctgtgctggcgctgcagggccgggatcacgatgccggcgttgtacgcgagcgacaggttgccgaacatgcccgcgacctgcgagaacttgatatcaggcgacggcggcgtggggtggccacgcatgccgtacatgacgacggccacgccgataacgtcggcgatgagcgtgcccgcgcagccggcgaacgcggccccggcgccttccttgagcgtcgggatgaggcatacgggcaagcacatgagcgccatgaagcagatccagtaggtggggctgaaggcgtccgggaacaggccgtcgagcagggtgccgcccagcacgaggaacacgcagggcacgagcaggcacgaggccatctgcgagatgaccgagagccagcggccccacttgcccatgcaccactcgcccaggtcgctgtaggtcttgacgctcttcggcgccagcagcatcacgcggcagatggccacggacgcgtacacgttggcgaaggccatgaaggccatgccgatgacggccagcacgggcccggagcgcgagaagttgccgggcataccgagcgtgccgatgccgtagacgcagcagaagatgttgagcgccaccttgaggtcctccgccgtgaggaacttcttggcgcagaccatggtggcgaacttgcagtcgacggagcggagctgtggtgggactgcctgcgtgcgtgccacgaggcaaaagtgagaatgaggagagcgaggcactgcactgcaagttggcggggctgtttgtgtttgatcggagacctggtaccttctgagaggtaggtacccgtactgtgcagggaagccatcttggccggacgagacgccgagatatacggagctcgtcgacgatgaggatgcgccggcccgagcgcatccacgccgtgctcagtgagtcggacaccccgagtgcaggtgtacagtatatgtaatacaagtattcatccaatcgaggcagacttccaaacaacaacgcgcgtgaagcaggagatcctgcacttccggtgcccggtgcctatgcagcgcagcgcatgttttggcaatcctcaaaatcaacatcgaattcaggtgcaggacgccgggagaatggtggtcatgttgaagtgcacagcaggggcagctacggtgctgtagatcgatccgctacttcagattggtctcccacgagtgacccaacggcccatcgtgcatgatttcgtggcccacgagtcgtgggggacgcgcatgcaacgcgatacgactgcaacgtttcgggcttcatgcaggcagtgcatgtagctcacggttgaaccacgtggtaagtcgccgaggaggaggaggtggcgggcgattccggcgcgagaagtaaagcatccattggggttacgtgtacttcgctcgtacatacatgtactacacacgtgccgcacatcgggttgatcaggcgggacaaggaacacgctgatcgttaaatcaacttgcacctttgcagctttgcggcacaacatacgcagcagcaagtcctgcttgcccgctcactacctgcacttgacctgcaagttgagtgcggacgagaccacgcagatgtgaaaggacgcctgccgctcgcgcccggacgcaggcgctgtgggctgctgcttcgagtttgcagggatggctctcatctcctcggtttgtctacggcggcctgccgcagacaaacggcacgaaacgctacggagacatacagttggtgatgcgcctcgagcggctgcggtcgacgactcccacgctgaagtggccttcgaggtcgcccgcccggaaaaggagcgcaatgcgagcgagcattctgctgccagcttttcgcccccatccccgcggtcttactgtgggttggcattttgcagcaagggagcatctccatcataggggatccggtgcctatcgcgcctgcaccggcacggtcctacagtctctaggctacagactgtggacgtcaaactctaatcaggtggccaatctctggcggtgcaaaaacctttacacacgggctttggggacccaacacagcgtgacgggctccgggtcgaccatgacgccgccgcggtcacattcgtatgccggcggctgcagcagtgctgctgctgttagcgttaaattcgtgcgatacggctgggaattttattccgccgaggctccacttgagccgcctacaagccggaaacgggtaccggatcccctatgatggagatgctcccttgctgcaaaatgccaacccacagtaagaccgcggggatgggggcgaaaagctggcaccagaatgctcgctcgcattgcgctccttttccgggcgggcgacctcgaaggccacttcagcgtgggagtcgtcgaccgcagccgctcgaggcgcatcaccaactgtatgtctccgtagcgtttcgtgccgtttgtctgcggcaggccgccgtagacaaaccgaggagatgagagccatccctgcaaactcgaagcagcagcccacagcgcctgcgtccgggcgcgagcggcaggcgtcctttcacatctgcgtggtctcgtccgcactcaacttgcaggtcaagtgcaggtagtgagcgggcaagcaggacttgctgctgcgtatgttgtgccgcaaagctgcaaaggtgcaagttgatttaacgatcagcgtgttccttgtcccgcctgatcaacccgatgtgcggcacgtgtgtagtacatgtatgtacgagcgaagtacacgtaaccccaatggatgctttacttctcgcgccggaatcgcccgccacctcctcctcctcggcgacttaccacgtaggtctgcagggttcaaccgtgagctacatgcactgcctgcatgaagcccgaaacgttgcagtcgtatcgcgttgcatgcgcgtcccccacgactcgtgggccacgaaatcatgcacgatgggccgttgggtcactcgtgggagaccaatctgaagtagcggatcgatctacagcaccgtagctgcccctgctgtgcacttcaacatgaccaccattctcccggcgtcctgcacctgaattcgatgttgattttgaggattgccaaaacatgcgctgcgctgcataggcaccgggcaccggaagtgcaggatctcctgcttcacgcgcgttgttgtttggaagtctgcctcgattggatgaatacttgtattacatatactgtacacctgcactcggggtgtccgactcactgagcacggcgtggatgcgctcgggccggcgcatcctcatcgtcgacgagctccgtatatctcggcgtctcgtccggccaagatggcttccctgcacagtacaggtacctacctctcagaaggtaccaggtctccgatcaaacacaaacagccccgccaacttgcagtgcagtgcctcgctctcctcattctcacttttgcctcgtggcacgcacgcaggcagtcccaccacagctccgctccgtcgactgcaagttcgccaccatggtctgcgccaagaagttcctcacggcggaggacctcaaggtggcgctcaacatcttctgctgcgtctacggcatcggcacgctcggtatgcccggcaacttctcgcgctccgggcccgtgctggccgtcatcggcatggccttcatggccttcgccaacgtgtacgcgtccgtggccatctgccgcgtgatgctgctggcgccgaagagcgtcaagacctacagcgacctgggcgagtggtgcatgggcaagtggggccgctggctctcggtcatctcgcagatggcctcgtgcctgctcgtgccctgcgtgttcctcgtgctgggcggcaccctgctcgacggcctgttcccggacgccttcagccccacctactggatctgcttcatggcgctcatgtgcttgcccgtatgcctcatcccgacgctcaaggaaggcgccggggccgcgttcgccggctgcgcgggcacgctcatcgccgacgttatcggcgtggccgtcgtcatgtacggcatgcgtggccaccccacgccgccgtcgcctgatatcaagttctcgcaggtcgcgggcatgttcggcaacctgtcgctcgcgtacaacgccggcatcgtgatcccggccctgcagcgccagcacagcgagccgacgcgcatgccgcgcgttgtgttcgtcaccatggccttcatctcgtgcctcttcctgatcctggccagcacggcgtactcggcggtgggctgccagatctcgggcaacctgctctactccatctacccggacgcggacacgggcctcaccacgctgggcttcaagtccaactggggcgccgtcgtcatggcctacttcttcatgcagctgcacattacgatcgccttctccgtcatcctgaacccggccttctacctcgccgagcgactggtgctcaagatgcacaagaagaaggaggacgacgtcgagaacgccctcacgtacgccgccgcctcgtacgccgccgccaacacgcccggcaaggacgcggtcaccgacgaccgccgctcgtccaagatgtcgtacatctcgaacgccgacgccgagaacccgtactacgacgacgtggaggcggaagctgccgagtaccgcggatcgaacgcggtcaagtacgtgatcctgcgcgtcgccatcatcgtggtgctggtcgtcctgtcggttctcctcaaggaccacttctcggacatggtggacttcgtgggcgcctcgtgcatcacgctcatcagtatcctgctgcccattattttcctgctcaagaagctgtggcacgagctccccatgtacgagaagatcccggcgctgattgtcgtcgtcgtgtgcggcttcctgggctgctacgtcacgtacacgtcgggcaagacgctgttcgcgccgacggactcggacacgtcgttcccgtactgcgacagcgagtacgagaacgaggtgtactacaactacactgccgtccacggcgcataagctagttagttctcccgcgctgtagcaaccaaagtttgtaattttcgtggtaacttctaaatactcgtccgtttgtcaccaacacgttcgctcgatggagtgaatccgttttgactcggtggaaaaggaacgatgagcagtttaggctcatgttagtatctgactcatcatgtcatgcagtgcaaattctactacaaaacagcaaagttcatggatccacggtcactgctcctccaacgattctttttattactaagactatgcagagattaaacgtgatctaaccatgaacagattgaaaaataggtaaaactattacttagtaagaggatcgaactcacatatgtggcaaaatatggagatgatttgtggttaggagtgaaaggctaatcaaactcagagatagctggttttccgcgaaatctattgaagtagagcatttaaaatctttttttggggtagagcacacgatttgcactaccggtagtcttcaccggactcatagctgctttcatccatggatttagttagtcgctgccgagtattcgaacatcggacgtttggatggtgggaacttcccactgggaagagtaatgagcaacatgtcgacggtgctgaaatataccgaaccaacatttcatcaattcacttgaccaactgaaatgaattcaagctgcatcgtacttccggctggccacttgtctacatagtgtgttgaaacagattcaatatatcgagctaacgtgtcggtgacaaacgatcgagtatttacgtgtgtatgtcagcgcgcaagccgtatgctcgatgttcctctcgggctgaactcggccgagcgctgcgtcagtacagagtctggcagcagaagctactagcgctcgtggacctacgttcgctacgccaacacttttcacaaagctctgcagaaacaaagtatgtgtcaaagcttgaattcgctcacaccgggcttgcacctatgggtgttacctggtctgaattctttgttggacgaactcgcgcagatccacggcggccctgaaaccagcgacaattgtcagtgtaatagttcgttaaagcagcacagggaggcgtacttgtagtagttagtgtcgggtgtgttgtacgtcgtgcagttgtcaagcattttgtccaggtccgccttgaatgcagctatggagacgtatgcaccactgtcgatgcggttgtggataaggtgcagatcaacagggtcttcgataaagtctaggtagtcgaccacgatggaagtatctacgggctcgtggaatggccacgcactgcggtggctcaaaacagcctgcaacaactgcgacagctccgacttcaggctagctttatcgcgcgttctacgtgaaggactgaaagcaaaatcattagcttgtcgtagattcgatctgaaaatggagtaagatctaaaaggtcacgtacccgattcccataatctcgttggtggtacttgtccacggttggaattcatccggcgaaacttggacagcgatagatgcctgcgaggttttttgctgcagttttccttaataagtgtctgcaacttcatctgccacctacgcaagtagccgaatttgtcagtccaaacgagaccgggcacattagcgtgaactacttgttactgcacccacggtaacttgccatagaaccggggtacgtctccaacagtttgccaatgaggtcatgcaaatcgcgtagcccggtattctccgtcctctaaccgagaatcctgtctgtcggtcatcgagtcacgctttccgcccctacagcctagacctgtcaattagactacgctaccgcggccttattgcatacattattcactcatcaagtcgactggaactggcttttgaactatctacgaaattacaaaaatagccacaatcacgctacaattcggacttcacggagccggtcggacttaagcgggcgtgatgagggcgcctggcgtagagaagcgagtggcgaactgcagcggcagcggacacacacaacagtgagtactgcatgtccatacataaataaactactttacggtttcgggagttccgcctgttgggataactggtaccttcagggcagtcgagggtttacagtacggaattaggggtagactggtgcttattaggcgttcatcttctaatacaccaagaatgtgtgcgaacgacgcatttagaccacctaacgctgcacatagattaactgataaacagcacgcggcgtggtgcagctggcaatcgtgctgtattcatttgcaggaatcaagcattataatacaccaatttgagtagtcgcgtgctcaacttaagttactactacgtagtagttggtcgaattaagtaaacccaggtgcatcaccagcgcgcgcatcgaggcgtcatacttacgactttttatgttgttagagagacaatcgtaacaagcttgttaggtgggctaaagaaatctaatgatgcgctaatgtcaagcacaaggaagaattcgcccagttcctcctcactacgtcagttaggaacagggcgatttcttcctccgcgtttatcgcgacgtgccgaagatgggtggctggagccgaagtatgctgccttagcagccttgcaaggtattaccatgtagtaggttttgagcgtgctctacgctcgccacgaccaatagaagctcgccatttcggcatatggtggatacattgagcatgttttgttcactttcgtagctgttctgtgcacaatgtacccagcgcttgaccgcaagatgcgaaagggcttccaacagcaaatctttgacaggttttgaagtatactttaatcaagtataatgcttattctgtaggatacagaataaggtctggggctagaagggttaagctgattaatggcaggatcttgctgcagtccgacactcgcttccataggaacgatagtcgcatcagccaagtgacaacaatgcactccaactcaaatcaaaatcgatcatatcccaggtaccctaactctcgcgcttcaacaaaacaattttagaaaatgctgctcgaattacgcgcagcgcacagcatggtcgtgcgcaatttcgaattactgtaggataagtagtatttggccggaaacccgaaagcttgccacctcgctgtagctaatcagcgatttgtttcttatcatttgaggcccagtgacctattttcatccaatcgtcgctcattagggttaggtttattttgttccaacttatttctggaatcgtccggaatttccttcttcgcgcaaataagtaaccataccaaactaaaaatgtttctcgtacttaatcgataggagcaaaacctgccggatgtagccacttccagacttgcccaagctgctcgacactgtagctggaaggtcaaggccgactccaacaacccagcaagcgcggtagtaaagtaaatgaaagacagaatggtcaagtaaataaatgaaagaatatgtagcaatcttgatcgataaacaatcaaacaatcaagggcttgatgtctaatggtactagctacactgcgcttggccgtcctgcagctgcgtgttcgcgctaagtgccgccccaggtccttggtcttgctctcgcgcttgacgaaatttacctgctccatcgtctcattggggtcgaggttgctcccttgccgctcgttcagtgggcgtccaggtgtagtagcgcgctgcgggtcgcgtcaccgctcacgtcctcgctggtcactgcgctcgccactttggtcggcatcgactccgtcgtcttggtcggcggacatcgcttcaagcgggcggaacgcccagccgtacccaagacattcacagcgccgttggcatccgcggacaagccggccgccttgctgctgtcgcaagagcctcttccttcgtcgcggccttctcggtcttctccttcgtcgtctcctcggggatgtggtcttccgtctgcaccgcagcatctgctgccacgcggtcggctgcctctaagtcttcatgctgtacctgcctgctcctcctccagcttcatcaccttcgacgtcctcctgctcctgctgcactacatccaggggccccgcagtcaaagtctcgcccgaagcgctctcctcccgcaccacttgaatgtagctcgtcctcgcgctgcccgcgcgtctgcgcctgctgatcccacgccgttccctcttgcccgagtcggcgatgctcgcgttcttacatctccaccccgtcgctagtgcgtacagcaccaccgccaggcgctccggcgactcttggtccacttccggtccgcccggagagctcatcttcgccgcgtacgccgagctgaacgccgccgagcacagcgcgagcggatataggccagttttcttcaatattgttggtgtaggcgcgattgggtgcgcgtcgtaagtcttgacgaagatgtagccgccacttatcagcgcaccgtgccgcggtcgctcatgcccacaagttaggcgccacgctgggctccgacagcgccggcccgccgctccttccactcaatgtacgcgacacatcctccgtttgctcgggcacggctgcaggctgtccgtcgtgccctccattgcatcctgcgccactccaaagaaagattgagagaaatataacattacataagtgcaaatatcacactatccgctgccgtccggaatgaataagtgggcgctgattggcgcaagtaattttatgtgtcgccagtgtgtctctattgcaggtatgacaggtttacggattccggtccggaatctggcaattactgttactaagtacagtacgccatgcaccaagagcaataacgcgttataaatccagatgaaagatgcagagtaggcaaagcgtagaatagtagtgacactggcaacgcatgcagctttcaaaataaatgcgcgctgctaccctagatacgtgtaccgtaaactactgcagcatgcacataatgcagcttagtgtagacattgtcgttagggcaatatatatatgaagctattggccggaccccggggccccgcatcatgtatcgatggcgaccggaattatttatttttatcggcggggcagtgataatatatatgttgtgacaattttgtgataatttttcgagtttagctagagctcatttcaccttcaagcatctagcatccagtatgaagtctaggcgaactggaggtgcagaggttcttcggcgcaaacgtgatacttaagtattgaaatcgtcgtgaccacaaagctgctgcattcgttcgttctgttaagcgtcttggtgaagatacgaccaagaagattcaagctgactgctagaagctagcgtctactacagcagcagcggcgttgggcacgcaaagttgcgaactctgcagctctgtgcaactcgatagtcgatactaccagagatacatagcatcgatacaaacatgcagcacttgaatttaccgaatataccagttgcttatgacagctggcggggcaagcggggacccggggtcccgccaaacgcttcatatgcatatacacgatacacaacaacctaaccatcgaaaacgcacagtcgctaccgatccgtattgagttgagctaaatttgctatgtctatttgaactgttatcgcgcaaaccagcattactacatgtagcgcggtgcagtgcgtaaattcatgctggcaaagttgcagtctttcagtgctaacgtagtaacaacactagagtacggtatcgacgacagctaccagtttgcaacgcagtataaaccacacccaatcatagtttcaatactttagttattacttcaaagtaagtaaacacgcaggtcactacactgtagtacttaagtaaggcatgtccgtgacaatgtagctcgcctcgcagaaacgggtgatcaataatacaacggcaacgatattcagctcactcgatgtttaggtactcaactttgcatcgtgagcgacatttggtaattagcttaataggaaaatgtattcctactcatttgctactaaagcacgaagttatagcaacgaatatgtgtcaactgtatccgcacattattgttatggaaatcaaaatgatgcatatacttttaagctatgctattccagcaacccgtggtcaaagcgcccgcgtagcgggtgcccagagcgctagttgtcgagcttacggttggtctgcaatacagcgcgcacaacaactgaaaggaccagccgtatatcttccaggcggtcgatacactcattcaagaaactcgaacatccgcgaaaaaaatcttgaatggcagctcgggtgttgtccaccgccagttgcactcgcttcacctctctaccatgccccacaatggcaatcgtagacgtaaagcatttgtagaggatcccctcttgttcctcagcaggaatttgcaattttcgactctcgaggctctcagtcacgttgagtgcctctcgacttgtatgagattgcctttcgagtgctcggcgcttgctgggtcgccctccatcgacctctaatttaatgtcgacaaccgtggcgtctcctgtgctcggtgactgagccggcctcaaggaggagctactcgacggttcactttgctccatagccgaggtagacaacccacgtttgtgagtcagtgagggtgaactaaggttatccctcctgtggtcggctgatcccaatgcagacggctcggttgagtcacgtagagatgacgcgaagccgaaggtggaggcattgttgagcgaatttctgccgtgggattcgtctctgttgccggcaccgattcgttgttcgctcggcttgttgacatttcctggaactcgacgccactcgaagcattcataccagccttgacattatcgagaagcggtccaatctgcatgccgaccgaggccattgccgcaagggacgcttgcacatctggcgccaacgtgttcagcggtgtccgagacttgtgcacgcttttggctaggcgcaccacctcctcgagacgtatcaaggagacaagtgcttcctccaacttagtcctcgtgtgctgcacctcatccctaatagcaggatgcatttgcttcaagccgatagacgccgtatgagcgccacctcgaagcgacatgtgcccactggctcacaacgagcgacaccgctgacttcatcgtctgaatccgagctgcctgctgcctgcagttctttgctagtgcctcaacatctggagctctacagacaacgacttataaagccggcagacacaaaaagccggcagacgaagtcaagcaaagcttaacatgagcaaaccagccaatcagattcaatcaaatgacttcatctttgtataccatctggttttgtgtactttatatgctttcttgtgtactttatgcaacacgccgtgtgttttatgacagttttacagatttgacgggagggaatttatcgttgtttttatatatgaggatggcattaagcatgccggctttgtaagtcgttgtctgtactgcaaggcagcaggataattctggcatcgcagtgagctcgcgccgttacaccagcaaccgccgcagcccgcgtgcgtcagtcctgaaacagcagagcagccaacagaccagacgcaccgagcagcatgagcggtggccaccaggagaagcactacttcacggaggagtacccggaccatgactaccagtgcacgaccgagtcggcgcacccgcagacgccgctgtggccagcctacctgccggcgaaccaagaccgtgtcgtcgtcttcgagcgcagcaagaacgcgcagctcgtggtgtactcggccaacttccgcgacaagaagcggctcgagctggaccccaagtggccgctggacatcaactggcagagcttcggctggacggctcaccccacgagcaaccccactggcatgattgagcgccggttggcatggggctactcgcacaaggccgtggagcccgagggccccgtcgcagttgaggcggtcggaaccagctacagcgtgacgctcaacgcgctgcccagccgccccgccttgctctacatcgatgccaaaggccgagtcatcctgcagaccacgatcaacggcgtgcagtcgcgactctggaagatctacgtaaagaccaacaacacgctcgccttcatccccaaggtgctgtacgttgacctttacggcacgaacgtcgacgacgaccacgccacctacgagcgcatcactatctcgtcctaacttagcggccaaacggatccacggttcgcccgaatagaaatacacattccttactgctcgttacctcgtgctaagttccatctcgcttcggccctctctccagctccgcctaccgtacgacgtgtctagagtttctttccatcgtagttccagttgccattcgcgccaccgtgtccgtgcagaggagataaattgtacgccgctgctacctcctcgaggaagctggtggagttgtgaatgcacgatccaccgagcaggatgcgctgacctgagttcgacgcagccgccttttgattgagctcggctaccttcatggcctcttcgaaggtcacgccgccacatacgtagacaatcacatcgcgcacgcgcttcaccccgttgcttccgctgaggtctgaggacgacgatgcagctgcgcctccgttcacaactccgaactcttggtccagcaattgacccttaagaattagctcaagcttcttcgctaacggcggtacgtgctgtgcatacacgttcggaacaccttgtacgcccttcgtgacggcccccatgaactttttgagaccggcgcgatcgccgtacaagtcgccctggcgagccctttgtccgccaaacttcaggaacgcgtcaatcagtgccacacgatcagagggcagtcctcctccgtggggagcagccagcaactccttgactgtcttcagctgcaccgagctgtgtgtttcgtatcgcaaagcatacaaaatcgccagtcgcagcttgttcatcggcttcacttgggcctccttcaactttgccaccacgtcacggaagtgcgcgttgtggtcgtcaccgcacgcaagttcctgttccagttgactcacatccatgagcccatccacttccacacgccgagccagctcgcccatgagcgtcacgtgcttggacacagtcacagactgagatctgaaagccgggtagttctccaaaaaccgctgcatgtcatcaatggactggatgttctcgtgcgtctgcgtctgagcttgatacttgtccacgagctgcttgaccgccataccgaggtcgccgaagttggcgtgcacatgttgcgcgaagaaatcgtccgaggtcgtcgacagcaccagctccgtcatgtccttgcgtacgttgggtgcgtcacggaggtccacgcggttctcatgcagtcccaacagctcgtggaccatcgcttggtagcaccactgcgtcagcagcggcgtcacagggtcgtccttgcggtccagcacgtacaccaacggagtcacctccggtcgtcggaagtcaaacagtccgtcctgttccagctgcatcctcgccgacacctcgcgtgccagtttctccgccacctccgatcctttggcgtaccgaatcgcaggtcgcttcttcatggacagcaatacagacagcagtccctccacgcttctctggaacagctgaggggacgtcatcttggtcttgtccaccgggtccgtcgtcagtacgcccgccgtcgcagtagatagcagtgctcctccgggcagagctgtgggcatcttgacgctgagctggacggagttgtgcagaccgaagtcgaagagcgaatcgttgaccgccaggtagtcggcgtagtactcctggatctgcaccacgacctccttctcgtcggcctccgcgagcttctcgagggcctccaccggcaagatattggagaagaagaggtggtagcggccgtacttgggcgccttgagctctcgacgcagcagctccacgttgcgagccgtggggcgcacgaacacggcggccttgaggtgcagcatgggctcgtgcacggcgtccagctgctccacgaggaacacctcgcgctgcaggatatgcgactgggacatgaccatgctgatcacgctcttggtgtcggcgtctagcagcagcgccttcatcccctccagctgcgggtccgagatgatcttctccaggtaattcttcacgcccgcgatggtgtccatggccatggttgcctgcctgctgcttctgctgcttcctcgctcggacctttccacacacagaaatgggagccgaaaatatcccgtggtgctgcatcgtgtttcgtgggttatctgtgtatcttaacatcagatatgaagtatagggggggcaggttgaagttgactgcaattgcaacgcgagctgaccatctcggctgagggctgccattgctggacgggaagagagcacttggcaattcgctggcttacgacgaggggagcatcgctgctgcttcgaccctcgcgcctcttgttgcttggtacatttgcgatcgcttacttctttcttcttaacttactaactactgctgtcgactcgctcgcgccgcttgcaattcactaacactccacgatcactgccaggctccaaaacgcggtgatgataccgaccacgctgatcgcaacggtggcgatgcggtccattcgggtggcgtcctcgctgcacagctgccaatagaaaacggaggggagaaccagcgccaggagcgccgtgggcacgagcatccacgcgaacacgtccagcgtgctgggagctgtgaaataccccaggaagagagtggtgagcaccagaatggtccggcagagcacgcgcgcggtggtctccactccgccgcaccttccttcttggtcgcttgctgccgcggggctggaggtcacgaaaggcagcgcccctgcggcggcggcggcttccactgggctgctacggccacttccgctcggaggctgcacgatccaccgctcgaacgcgcgctgcagagggaataaggtgatcgtgtacgacagcagcaggtggatgctgtacagcacgatggccaagttgcgcaccacagcgttgcgcatgttgaaaaagaccggcgcctgcaacgtcgcaccgtacacggcgtatgtgacgcagcaaatgggcagatacagtaacgcggtggcccccagcttcgtgcgcgccaccacagagctgcattggctcggattcgccatcgcgtcatacaacgtagggatgagcgagtggccgaacagcgcgccaagcagcagagagaacgtgtacgagagcttccccatcatcgtcacattcgataggtcgggcgtcacgaatacaaagtcggagtgctccagcgcaatctgcttcagcgggtacatggcgtcgccgagaatgaccgactcgatccagaagctgacggcgacgttcactgccgacagcaccgccagcgccttgagcgacggcaccagcacttgaaaccacacgcacacggccaccagcatcatcacagtgccgaactgcagcccaagcacatccacgagacacgaagacgccagcgccaagtagcccgtggacagaatcagaaatgacgcgtgcaccagcatgctcgtgaccactttgccggcagcgccaaagcactcctgcccgaggtcgctgaacgagacgctggtgcctctcagccagcgcacagtctccagcgcgtccaccagcagcttggacgtgtacgcgctcacggccgccgccgcgacgagcagcagcacgccgtaccagttgatctccacgagcgccagcggcagacacagcatccccgtgcccgtgatgaacgacagcaggtggtagaacgtctgccagttcgagagcttgttggacgcggagaacgacacgggaatggccaccgagggcggccagggcggcgtcaggtctccggtcgagtccttgtcgttgcggctcagcgtggtgccgtagcccgcgcggtcgccgttgagcagcgagaaggcgccgacggcggccccgcggccgtcgaagctgccctcatagccgtcgtagacgctcggtggatgctgcgcgggcggcaccaggcgatacgtctcgaagctgcggcccatgcgctcgccggccattcggtctcagtgcgggtttcgttgcccgacgacgctctggggctgaaacgaatcttcgtcctctccgacgggattgggagctgctacctttgaaggttgacagtagtaaacgactggcaagagagctcaacggggtatacacgccaagcagcgctgcaatgtgacaggcactcggtcgggatgcacggagcagaggtgaccaatctggacgagcgataactgggcaccggactgaaggataggccgtgtggcacacatgcggcacaacattcaagcgacattacatcgagagttgaagttgaagtagcctactgtacgtctctccagcggtagcaacgctgcgccgcgctcacagcgtacacggagagccccagcatgaagcccactccagtgttgaacgccagacagcctgacgctgtcactagcagcaatagaagcgctgcatcacgctcgccttcagccgtctcgagcttcagtcccacaatagcgaggctcaggccgctgaagaccagcatgacgcccagcacggacgctgggaagatgcccgtctgaagcagcgcaacgcacgtggagcccagcagcagcgcgaagaacatcttgaaggccccgaggaacaccatcgccaggctgctccgcgcaccgaaggcgtactgggaggccaggccgcccgcaccatgacacaccggcagcattccgaaccaagagaagagaagatttccgccggcgatactgaagcacacgcggcgcacgccggcaggtttgtcgtgggtggggaagagctcagctgccagcgattcgagagcgactaccgagttcaacaaggtgagtggcagttgtggcaggacgaggtacacgaaagcctggccaaagtcgtgcatcgtggggaccaccggcgcgacgaacttcggtcccagcgctagcgacggcagatgatactcatcacgtaggcgaagatactggtatacagcgaccgtcatgccgtacacgaatagcagcaaggccatgggcactttgcggctgcggatgaacacgatgcacaaggctcctagaagcaacgacaccgtgacagaatccaacccaaaccaaatgacttcgttcttgccctcagcagcagcagctttgacgtacgcactcttgaatcctttccccatcaagctgatcccgactcccaactgaatcccgcgcacaattggaaccggcacgaccgtacttggatgcgtgatgatgttggtgagcgccagcagtcccacaatggcccccatgaggatacccgcagcgataatttgctcgttagggaccttgtcggcgatcgccacagctgcgatcgtcttcatgggctggattggaatcggcacattgaagtgaagtgccaagcttgacgtgaaaactccggcgaagaacaatgcggctccgaactcgatctgcggtgctccattcacgcgtccaatggcaagcgcagtgagcagcggtaggaacagtccgatgtctccaaatgcacctgagacctcctgcaaggtcatgaattgcttcaggtacgctcgccagcctggcctcgtgaacacgaacagctttcgatgcagcggctgcccgatctgtgggcccgtcaccttcgcgaaccggtcgccggcgcctaggggtagcatgggggttgacgctgatgccccgacatcatccgacaggaccagcatttcctagcgcggttgggcaggcagtcggtctgtttcttggagggaggttcgtaaatgggggaagaaggatgagaggcgtgtgcctcgcaatgtgcaaatcaaaaggtatcctcttttacttcaggagtacacaagtgccgaggatggccgcatggggcacgctactgcgaacgcttgattgaaaaattatattcgagttggtgcgtggctcacagttggtcttgacctcatctttctgctaccgatgcctcgtcaacgacgggcgttgaccgaagcccgatccccatgtcggtttgcgcgccgagcgtgaggcctctcttgtcctgtacgtacatacctactgcgggggctcccattcgaacggctcaggcgggtcggcctcgttttccgcgccagcggcagcgggtgccttgacggcctccacatcctcggcctcatcgggcgttgtgtcgcgcagcatgataactcctgccagtctctgcgccgggtgcatcaccggaacgtacctctgcgctgtgtccagggagattacagactcctgtgccagcgtcacacgggcaggcgtcgtaaatgtgaacacgctcggttcctttgccgccgctgtcttcttgccagtagccggcttagctccctctgcatccacctccatcgcatcgccggtctcctccttcttctcctcgtcggccttctcctccataacgatgtctccgctagcatcagacggcttggccgtcttctccttagcgtcctgcttagcctggcgcgcacgtgccttggccgttgtggacaacacagccgtagccaccagttctttcttctcctccttcttctcctccatgcgcttgggcgtggcaaacgccgacttcttagcattacaagtgagctcgaagccgcgaggaagcttcaagtccttgttaaggccaacggccatcgtggtctggaatgagagctccaggaagttgaagagggggtaccagaaccaatgctgtgcccaaatggccagaccaactacggcggccattttcgtgaaaccagtgtgagactgcagcgaaatcacaacgttacggccaccagcgtccaagatgccctgcgccagaatggcgcccatcttggtcatcgtggtcacgtgcttgtcggtaatcagcttcatgatcttcgcccggatagcggccaccttagggttgcggccctcggactcctgcataataaccatggcaagggctaagagggcaccttgacgcacgtagtctacagcgtcgtcaagaagcggctccagcagctggatggcctcgttcttggcagtgccggcacaagcaatgcccacagccacacaggcaccgtagcgaacgtgagggttaaagctttcagccagcagtgacaccagcttaggcacctgcacaggcgtgcggaacaggataaagcccaggcacgtgacagcagcgcggcggacgtcgtccgacacatcactcacggccacatgcagcagtcgacggatagccgtgttgttggccgtaccagcgtacgccatggccacggtgtacataccgccgtagcggatcagggggtccttgtcacgggtcagctgctcaattaatgcgtcagcctgctcttcgcgctcgtacatcatgagcgcaattcccatcacgcaaccgcgaatgatcttctcgtgcttcgtgtcgtgcgcatatgcgaacaagtccttcacaatctcaccattacgaccctcaccgcctgcgcccagcagagtaagaccaattgcaagacctgcaccttcacccgcgaccgctgaatcagtgaacagcacggtcttcaactcctcgtacaactcgtagtcgtgcgaagccaaaccacacagaccaatgcccaaacaggcaccgtgctgcacagtctcgtccgagccagcgttcttcagcgcattgcgcaagtactccatcgtggtcttgctacccgatcccgcaaagcccttgttcgcgtggatcagacccatcgcgtaaagggcgccaccctcagagtacggagaagtagtcatgcctccctgcggcaagtaaggagccaaaaggttcatgctctcacgaacgtggtccttgtggacgacgccgagactagcagtagccgtgaatttagcccagttggtggccttgcccagccactccaggttctcgcgcaaaaacgtatccgacgtagtgccgcagttcatgtaggcgtgcgcaatcacagcagcgtggtgcagcaccgagttgcggttttccaccgcggtcttaatagtcttcataacaagcgggtccgagtcactgtggctgtgcaggaagtctagtttcaggtccacaaggaattcacccgacaagatctgcttcaacttggcgagcttgtcccagtaatcagcacaagctccagcaggagcttgcgggggcgtggcaggcacatcggcgggtgcgggggcttccgtcttaccctcttcagctgtggtggtcgtgtctaccgctggttcggcagcgggggctggcggactcgggagcgagtggtagacattcatgaggaacttttggttctcgttctcgttgaggtcgaacgccacctggaacgcgacgaggcagtcgctgccgcgcacgagctggtccagaatcttggcgacttccacgtggttgtccagcatctgcaaaacttgacacacgctggcgtgctcctgggtcgggcgcgagcggtagacttccagcatgacctcgaacaccttgaggcggaagtggcggttgctcaccaccgtcttgcagatctcaaagcagtacgccagagccgccgacacgtccgtggagcgagcgagacactccttcacctggtccagtcgtcgggcctccagagcaatgcccatggcctggcggaactcgccggccgcgtagcagcgctcgaacatgcgctccaccacctgcgtgagtcgcgggtccagcgccttctcggcctccgggtcctccttggcacgcaccgccacgtagttgtcgatgcacgtggcgatgatcgtgtctgtgtactgcgagcgcgtgttcaggtcgaagtacttgccggcgcccagcgccagacgcagagcgtcctcgtactcctccaggtggaagaagcacttggaggccacgtaggccgccagctcgcggtccgggaagctcttctcctcggaaagctcctcgatcagcgggatggcgtccgcgatctcggcccagtagtggtccaccaccaggttcagcttctgcagggcatgggcctgggtgttgacacgcaattacgacgttagtagaggtcccccagcgataaaacgaagtgcatccgatgcgccgcgctgtgcctcaccttgagcgcgttgtcgtcttcttccaggagcgcgaggacgcccgcggctgagcagatacagacaaaagatccacccggtggaagttagatttgcggcgcctgtagacgacggctggagcccgtcgtcgcggattattaaaggatagatacagtgataggagggagacgcagggggagacgcctccgacggccttgagagacggtaaacgtaccggagttgccgtgagcgacggtcatgctgtctcttcctgttgttgcttcacgctccagaaagaaatcttctcctcactagaaatcttcccttcatgccttaagtacgaatgtacttagccggagctgaacaatacgtctactccggtgtttattacaaacatagctgcatcgtttcccttgtcatttggattgtcttaccaaaaattacacaaactatagccaggttgaagtgacaaaagatacttttgcgtctgttgccagtcattcaagcagcgcgacaagaccaaaactacacgaaggccatggtatgcatgctaccttacatctttacgacgtggatgcggtggaggctagttttccttttgcactggttcaagcaagacgcagcgagctagccttgctgctccaacaatgaactaacgtcttctgcacgtgtggtatcactcacatattgcaccttactcgcggtatctctgttataaatctgctgacagttttcttgccgcggtgtcgtctatatgagacgctatcggatgctacgttctcgtatcggacaacatcatgaagttcctagtcgttgcaacgaaccacatacaatttccgaaggtcatcgtgccgcacgattcgtgtggcgaatcgaagctgctccacaacgctatgattgtgtcttttcaaaaggcgcgccaaaatagacaccaaacttgtcctgcgggttatccgcaaaggatcccaaatatctcgaacaactttctgatctctgtattcaggttagctggccgcagcctgggagcttagcgacttcttcccacactttagggctaacaacgtcaatcccagagcctctagcaatgtcaaccccattccagtcctgtggcggatcaccagtacatcccgattccacagcaccaaatcgcattaagcgcgaaacgtgtaaggctaacttcaccactccatctcttccgagagactcgacccaccctcgtggcacttgaaaggaaacaatgtgttcaaacagggcccagtgtgagcagattatcgcaactgctgaccgttggttgtcactttgccaattgggtggcaaaaacttacacatcgtgctgctccaggtggatgcttgaaattgtgagtttcctcccgcaagcacctttgcttgagcacgattgagagccgttcgcactgccagcgaagcgcctgtcggcgtgtggcgtgtgagcattcgcagagattggttgggctggtccaatttactaaattgaatttagtatgatcggcagtgccgtcggatctttgggcactagttgcgcctgcatcgaccagcggacgagcgagcaagcaagcaagtaaagccttgctacaatcggcaaacgtcccgagctgtcgccctcgcattggtgatttctgtgggtctacgacagaccaacacactcaaaaccggggcgacaccgaaagaaacgctgacagtcaagccatacaaaaaccagactattctctttgaaaatggataggacctccaaactttggataggtaacagcgcaagcgccaaccaaaaccatcaaggaggttcatgtttcagagggtcaacttgcggcaccgcacccgtgtgcaatggtccttcgtaaagtttacattgctcctccggaacgacaggtggtactagtgctaaccgatgtgccgtgtacacgttaaatcggcgatagagtgagggataaactcgacaagcaccagaagtgcagcacaagtgaagcaagtatcataagcttattgcattgcgatcttccgaacaagtccatgcagatcaaagtgcaactttgcgccgtcgcccgatcaccacgggacaagttcaatcggaagaatggcaccacgttctttgacaatgctaacctacacgggcggcgaagtgcggacaaacagtggagatgaccggggtttgatttacttacataaacttgcacgactttttggctatgctcaggttcgggacttccatcaacagtcggagatggtgctatccattggatggctaattgcagtgccgtggccgaccacgaaggtatcagcagtccgcaggttcgcctatcgatctgccaaagaaacgctttgcttgcccggcagcaaatgcagctagatacgcgctcaacgtgtggtggtgctggctgggctctgtccggatgggggaatgctgaagctgaagctgaagcaactgcgctacgtgcgtatccgccgacggagagctggcactgccagtggcaggctagcacctccaggtaggttggtcatttccacattagacgcgtacctgcaatagctgcctctgctgaagacccaagcaaaagatgaaggtcgtcgttgttggttccggaattggcggtatctccgccgcctaccacctggccaaggatggccacgaagtcgtgatgctcgagaagaacgagaccctcggtggacacacgtacgagatggagatcgacggcgagatggtggacatcggcttcatgatgttcggcgactccaaccccaacattaaggcgtggttcaagtctctcgggctgacggaggccgatggcaccaccaagaagcgcattcccatgagtctgacggtgagctctaacatcgaaggcgacctccagttctcgtcgcgcgctccgttccacggcagcgtgctcaacctcttcgacctgcgcatctggcgtgtcctgcgcgacatctaccgcttcaccatggacctcatgaccatgcccgtcaaggaggacatcacgacccgtgagtggatcgccaagggccaatactccgaggagttcttccaccactacttcctggccttcgtctcggtgctgtggacggtgcccaagaacgacgtgctggacctgcctgtgacgcagttcctccgtgcgctcaagacccactccaactcgctgtacatcccgctctggcaggtgatcatgcgtactttgggccgccgctccgctcgcccgaagcacctctggtggtacatcggctcgggctacattgagcccttcctgaagatttttactgaggagtacaacggaacggtgcgctacaacgccaccgttgaccaggtcgagaagggcggtaaggctgtcatcctcgagggtggagagcgcattgagtgtgaccacgtcgtgctggccacgcacgccgacgagagcgcgcacatgcttcgctggagcgagaaggcgcagcgctcgctcatgcgcttctacttccacaagagcatgatgtacgtgcaccgtgaccccacgcttctgcccaagtccaacaaggtgtggagcagctggaacgtgttgatctgcaacgaggaccagtacatcctgacctactggatgaaccgtatccagcacctcaacagcaagaaggacgtcttcgtgaccatcaccccgtacgaggagttcgagggccagacccccgacgccgacaagaccatctccgccttccgctgggaccacccgcgcctgctggccgactgcattgcgcaggacgagatcatccaggaggagggtatcacgctgtctggctgctggctgggccgtggcttccacgaggacggcttcgtggccggccgccgcgctgctgcgatcatccgcgacccgaagcacaagaagacggtgctgtacgaggacccgggcaacatcgcgactccgcccgtgcctcctttcggcgtgccgctcaacttccacctcttcggcgccacggtcgtcggcctggtgggctacggaattgccaagtacctggacgtcaagttctaatcggtgtgtgcggcgtagaagcagtgagtgtattaagtcgagcgggctcgacgcacggagttagtgcgtgcaataggcaggcagacgtgtgatagccagcgtattctcccaattcgacacgaagtttttcctccatttcctcgagtcaccatcgaacgacttcaagcggctcaaggtcaacgacaacttgacctctccctgcacgtcgcgctgcaaggatacgcgccctcccggcaggcggcaaactgtgtcgtcggtggtctcggcaccaccgcaacccgcttcgcttcaacgtgttgcaaccatcgaggctcgagcagagtctcggtgtggcgatggccccgcttccctgtccttggctccgttgtgagtctgccgccaaggcggcgctgcaaagctcgaaatggttttcgccacgaacgtcgcttgatggtctcgcgagaccattcagatggactgtctagccccggtgcgtttgatttgttgtttgtatgcccccctctgtggttgtggaagcgggcgcagttggctcgcgcagacgcgcgcaatgaccatttcggattcccccgccgcctgcagactcccagccccgcagcaatgaaggtcgtcgtggtcggctccggcatcggcggcacctccgccgcctaccacctggtcaaggatggccacgaagtcgtgatgctcgagaagaacgcgacgctcggcggccacacgtacgagatggagatcgacggcgagatggtggacatcggcttcatgatgttcggcgactccaaccccaacatcaaggactggttcaagtcgctgggcatcacgcagccggacggcaccaccaagaagcgcatccccatgagcctcacggtcacgtcggacgtggagggcgacatgcagttctcgtcgcgcgccccgttccacggcagcatgctcaacctgttcgacacccgcatctggcgcgtgctcatcgacatctaccgcttcacgatggacctcatgaccatgcccgtcaaggagaacatcaccacgcgcgagtgggcggccaagggccgctactcgaacgagttcttccgccactacttcctggccttcgtgtccatcctctggacggtgcccaagcacgacgtgctggacctgcccgtgacgcagttccttcgctgcctcaagacgcactccaactcgctgtacattccgctgtggcaggtgattctcggtgcgctgggtcgtcgcacggaccgccccaagcacctctggtggtacattggctcgggctacatcgagcccttcctcaagctgttcaccgaagagtacaatggtactgtgcgctacaacgcgaaggtggaccaggttgagaagggcggcaaggctgtcatcctggagggtggagagcgtatcgagtgcgatcacgtcgtgctggccacgcacgccgacgagagcgcgcacatgcttcgctggagcgagaaggcgcaccgctcgctgatgcgcttccacttccacaagagcatgatgtacgtgcaccgcgacccgatcatgctgccgccgtccaacaaggtgtggagcagctggaacgttctcatcaccaaggacgagcagtacgtcttgacctactggatgaaccgcatccagcgcctcaacagcaagaaggacgtcttcgtgaccatcacgccgcacgacttccagggcaagcgtccttctcctgaacagaccatctccgctttccgctgggaccacccgcgtctgctcgcggattgcgtgccacaggacgagatcatccaggaggagggtatcacgctgtccggcgcctggctgggccgtggcttccacgaggacggttttgttgctggtcgccgtgctgctgcgatcgttcgcgaccccaagcacaagcgaacggcgctgtacgaggacccgggcaacatcgctgtcccgcctgtgcctcctttcggtattcctctcagcttccacctcgtcggcgccaccgtcgtcggcctggtgggctacggacttgtcaagctgctggaaaagaaatagagcatgttaatgttgtcctcggttgatagccttgtcagatatgcacggagatactgtgtgtattcagttttcagcaataaagcatagcgagttaccattgaaggatcgccttgacgtgttcatggccagcaactgcgtacaaaccccgggctctaccaattctgctcagcacagcaataactctgctactgtagaaacgactcaccgcagcgagaaatcggctacaagcgataggtggtcactcgagtgttccttcgtgggcagctcatgattcgagaacagcaatccggcaggaatcatttctacaaccccatggcagtgcagtgagctccgagtaaaccaaatgtagtccactgtgcccttagaggcgttgtggaatatcgtgaacttgggctcgcctgtgctcttgtcatccggcgactgagcataagcgctggcaaagtcaaactgtaggtacgaaaacaacaagtcaatgacagcgcgctcgacagtttttggaaatcagacttcttacctcatgcgagaacaccgtgttcggcttgtagactcggaagtcatttcgttgagctttagcgctgtcaaatttcccaattgcagtaccgttcccatgatggcgagtccggtcgttttcgttcgttcgaatagttttctgtgtgatacgtagtggttagcaagtcaatcaacaatcatcttactaacctctcaaaaaactaaaacaaaacgcaccttccgagcatggttggtcaagttttgccccgacaagtcaaaacgagaaagcccagaagcgtccagctctccagtagacaggaaatggtagagtgggctgtgcggtgccaggttaaaatctcctgagagaagtaccggcagcatcgcaccgccctcttgccgcagagacgtcaggtgctccatcagcatgttcaactgagctaatttgatttctcctcgctacgcagcagtaaacaaaaaacacaagtcagcaaaacgaagtacgaaacgacaaaagcaccatgtgtgccagctcacgaacattcgggttgaacagtatgtgcgtattcgcaacgacgaagcgagcaggggtcgatccattgacgttcgatgttgcctcaaccactgcagtcaatgcaatattgtctttttgcagcaccggatgatcgggtacattgtactcgatcgggtgcgacgatacaatgcggaacatgctctccttgacgaagatcgcgcagccatcgtgggttgtctctccggttctgttaacacaattgtttactatccaaaatcaacactgcaacagcaagaccaagattacctcctcttgtagatgcccacatagcccgcgttcttcagtctcggctcgaagaagtcctcgaaatggtccacttcctgcagattgacgatatgtggcgaccaccgcagaatttccttcacgagacgacctcgacggtattcccaactgatacaatgacacaatagaagcacggtcggtccctactgggcaacagacatagtagcggcgcgcaagcttccaactggtgtatcctcctacctgtatttcatttggcgcttggccggttcgttctcccggtcgttctgcaccaaataatctgcaccaaaacacacattccacttcagtatttacccacatatcattagcaccgcactatatgcactgagttacctgccagcacgttgaatgacatgaagcggaaggtggaggctgggatgggtacacttgggtcgtcggcgcttttcggaggcgcgtacgccatccagcgtctgtggatcgggcgcggcttgcgcgacgtcgtgcgctgccgcttctcctcctgcgagctgctgtcgtccgcggggcgcctcgagcgctggcgctggcggcgcgacgttggcgccgtgtcctcgtccatcagaaagcgaaaatgattgtcagttcaaatagctgtgtgcaccacaccattcctggttttagtgcgttattattgagtcgaggaggacacacgcaacatgaacgcgccgaaccgcagcgactcgtacctgctgcccgagggcgcgcagaaggtgacgtacgagaaggacaccaagatctccaacgccggcaagttcaccatcctgcgcgaggaccacaccatgggcaacctcatccgcatgtgcgtcgtagtaaagcgaaccctagacaagcggaggaactcaatgaatagactaaatgaccttctcccgtgtctgcaggcagctgctgcgcgacccgaacgtgatgttcagcggctaccgccacccgcacccgctcatccacgacatcaccgtgcgcgtgcagactaacgacgcgtcgtcgcccgtggaggcgctggccaactcgctggacgacctcagcaccgagttcgacgagatcgcgcagaagttccgccgtcttacaggcaactccaaggacccgagctccttcagttaagcagttccccgcctaagttcgtcattgtgtctttctgtctggtagctactaggcttctcgtggcagaagaactaggcggaaccttgacatttcgacggagaaaaacaaagtactttaacacgatggaactggtgcactacgctttgcatttggagtgcattctattacgatatacggtgctcactcttcgaagcgtagttccaaccgacctgtgtcagcgtccgtgtacaggagcagcgacatcacgatggcttcaaggtgcatctgctgctcgatgaaggtctcgactgcgaattcacggagcagctcgcgactttcaggatattctacacgccattgtatccactctagtggatcccacacctcaaacactacagctttggctaatggggccacttccgctcgtacgcggcaatacacagcgccggactcttcctcatcgtcgccttcattctcatcgttcgtgatgcggagcacaggcgacacaactcgaaaaatgcatcgatctaagctgacctcgaactttgtggcatcaccctctgctgaagtgatggcgcacttcttgcagagctctttcaccaagactggccagggggcatcacgattcaatcggtggatttcgttactggcccccgtcatagcacgaagcagctcttcacgcttcttcttggtcgatggggtcttcgttttcgacgccttcccttttgaagagccaggtggtgcatctgtcaaccgatgcagcgactcacgggtctccttcatactctcactgagttcaatgagacgttttgacacgtgtgaggtcggtggggcaacttcaggaactagttgctgctgctcgtgacaggttttcgttagtgcgatcaactctaacttggaaatgacaaagtttgtacatcgtttgcatgcgctcgcatcgtacagctccagtgaaaatagctgtccatcagtgtccacgtcgtccaaagcatcgctagtttcaggtgccaacgcaaaaaacgagtatcgaagatgcactcccgatatctggcagcctccagaggacagaagtgaatgtctaggtctcatgtggacctttgcaagccacgtacgctgtccaacttgttgcttcttcaagggtacaattgactgcaacgctgtcgataccgtctgtagcacttcttcgcgtattttcttccgagacctgtcagcccgacgctgagcgcggtctccggatgccttctccttctcgcttacatgttgcaactgctgactcagctcggctaattgagccgctgttgacttcatttcagccttgagcgcttgacgccctgttttgagagatcgccgttcttcatgcaaacgttttacgtcgaaattcgtgccaccacctccaccgattgcgtcgatctcttcgatccgagccttatgcgcttggtccttttcgttcaactcggttcgtttagcctcgaccttcgcaatcttctgccggatttcgacacgctcagcttcagcatcattatggagacgaagttgattcattgccagctcaagttgcagagaccgctgactatctcgcaacattttgttaaaaagttcttcgcgtttgcgctcctctgtcatcaccggaggaagaagagggagagcattcgttcctggaccatgtcgacctccgtttatcccgagcatcatgcgagcgttggatctgttatcctcacgaccgagaagtcgaagtcgcggtatcaatttccgtgccaccgttagggtttgctcaggactgaaaccacttcgagggtacggatacagttttacgagcgatgcagcctcgagcaacccaactgtaagcttgtacgtcattgaggcgctggggttgtacaccgtgattaccaagttacgcgcttgagcaggaaaatgatgcactgagacgtaaaaccgccgaccacgaagttttatcggttggcagaacactcggtgcctctcgcgtcgcggcttggctaataacgctgcgagttcttcgagacgacgggcttcttcttgtcgcaaacgctcctctcgctcaagacgccgaagtgccgactcgttgagctgaatctccggcgaaattcgcaacacttgcgaaccaactttcgggggctgagcgatttcttcactagggtacggatcatcgccaaagtttctagcgtctgtgttggggtcgtccgagtactcaaagtagagtaaggagataagctggcgcagcaactcttgctttctgcctggcgctaacaatgcttcgcgctctgggtcagctccacccgatagaaaaagcctttcaatatcttgtagcgtcacacgaagggagtaagttcgacttgtggctggttcgtacgcttctacgtgcaaacatcgtttcttgtccttcccggttagtccagcgccgtacaatctcccaaaaatgccttcgccatatattgaaaccacgcagtagctgcgagaaatcagcgtgccttgagcacggagaagcaatcgcgtgggccttttcactgggctcacggaacttgcagaattgtcgaaattggttgaggtaagacgcgctggaatgtggaatcgacacgcctcgtatcttgcccacttgccacgattatttgctcctggtgctctcgtcatactccatggtgttacctgctggtaatgcgaagcaccacgcagcagcatgggcagttcatcttgcgtccagtgtttggatcgatcacgtacgggctcacgccaccgttcagcgggcagcatttcaaatccacggtgttgtagcgaatggcatggcatgagcgcaacttcatcgccacccacgcattttttgggtatcgcagcaagttgcaaagcgttgagtatcggcttgggttcgttgtactcctgaagccgaacgagctgttcaacaccaatggtgggtctaccattgatgtcgagcaatagtcgtggtcgttgcagtatctgcatctcaagaggaggcaatggtggtccaacactgttagaagtagatggctctgctgaatgaggacgagatgatgacagacgagcagcttcacgttcttcaatgtcatcaatcaaagtttcaagtctctcgagtccaacaagactatggcgtcctggggatacggaggctggtaatggcgtcagaatcgcaccaggtagtgggtacttgcgctgctttgctcgtttctgctttggcggtgatttcttccaaaacttccattgccatcgagacacacttgctgaagccacctccgtcacagaatccgacgagctaactctaggatcgtcgacatcgcggtcgtcgtcggtctcactgcgctcaagaagaagctgaggcaattcaccaaatgcctcttttggaaggcacggcaagttcatggcccatggagtcacgccacaagtcggcgactgtcgtaacggtgcaggatcatttgagacggtatatttaggacggtagagctgtagttctgtttgggtaacgctacgccttccacgtccggagatggcaggacaccggtgcagtcgtagatgtttgtctcttgttaaggcaaccgtacacacctttgccgctgggtaatgtggtgcagtgagatccgttgggtaggtcttgtcgtgcgtctgggcagataccttggtggttgtcggggctgcagatcggccatccatgcacgcagaaggtcttgtcgatgtcgtggactagcactcgcgtgccgttggactcgtggcaggcgtcacggtttgcttgtgataccgttagctccgtagccactgttgcctgcggggtgtcgggggaccaactggtcggatcgagtgtatcgctgctgccatcggcggacgcgaatgcaacgatgggaatcaactctgcaggatcagcgagtacttgagcagacatcatggcggctctgacagcgtgcaaggcaaggaacacagaagcagtcatggatcgagcggccccgacagcgtgcaaggcaaggaacacagaagcagtcatggatcgagcggcgccgagcattgtataacggagcggtggcgctgccaaaagcgcgcagcttgcgctccacacgggcagtgtgcgtctgcggggcgggtggggactatgacgcacagcagcaagtcggcccgcaaccgcaaggccactgctgcacgagcgaaatattctgttcttcctcctgagactgtccgagcgagtgcggagcgatgcgattgaagacggcagcgtcgcgtggaggttggtctattatttgctgggcagcgattgatctgggtgaggcagctcctcacttttcttcggtttcgcgtgcgcgcatgcatgcgtgcgtgcatgcaagagaacaaggtacgcagcggggggaaggcggtcggccggcttgcaggtcagcatcgaagtgcgcaatgcgctgcagcacgtcaacttcaccttggccgcgtggtgttcggcacacgagcggaccgaaagttgggcctgggcgaccaaaagctttgtcggaaaagagcgtcctcgaggggactcgaacccccaatccccgccttcggagggcgatgccttatccattaggccacgcggacacgctgaagtaccgtctctccacacggataccaaagcctgcatgcacgccaagatcgtcgcaccgtcacatgcacgcgacggaaaaatacgcccatacgatcgacaggttgcgcgaaggtcgccaaacagtaccgtgtctgacgcccgttgagtgctgccagcagtgtggccttcaacttgccttttgcgcaccgaccaaaactgctctgatcaactgtgaacggccagctccgtcaacgacatggctttcactgatctcaacaaagaatgtgtattttggatgctgcggaactacgcacgcatgcacgcactgctctgtagtaacagggctatcgctggcttacttgctcgatcgctcacgcgccgtgaacggcggtgtaattgtagtacacctcgttctcgtattcgctgtcgcagtaggggaacgacgtgtccgaggtcgtcggcgcgaacagggccttgcccgacgtgtacgtcacgtagcagcccaggaagctgcagatgatgaccacgatcggcgccggcaccttctcccagatcgggatctcgttccacagcttcttcagcaggaagacaatgggcggcagggtgctgataagcgtgatgcacgacgcgcccacgaactcgaggaaatccgagaagtgatcacggaagatgatggagactacaaccagaatgaccaagatgagcacgcgtagaatagcatacttgaccgcgttcgagccacggtactccgcgacctctgcatcaatgtcaccgtagtagggattctcggcgtcggcgttggaaatgtatgacaccctggatgagcggcggccatcgttgatcgcatctttgcttggcgtgttggcagcttcatacgaggcagcggcgtacgtgagggcgttctcgacgtcgtcctccttcttcttgtgcatcttgagcaccagtcgctcggcgaggtagaaggccgggttcaggatgacggagaaggcgatcgtaatgtgcagctgcatgaagaagtaggccatgacgacggcgccccagttggacttgaagcccagcgtggtgaggcccgtgtccgcgtccgggtagatggagtagagcaggttgcccgagatctggcagcccaccgccgagtacgccgtgctggccaggatcaggaagaggcacgagatgaaggccatggtgacgaacacaacgcgcggcatgcgcgtcggctcgctgtgctggcgccgcagggctgggatcacgatgccagcattgtacgcgaccgccaggttgccgaacatgcccgcgacctgcgagaacttgatagcaggcgacggcggcgtggggtggccacgcatgccgtacatgacagcggcaacaccgatgacatcggcgatgagcgttcctgcgcagccagcaaacgcggccccggcgccttccttgagcgtcaggatgaggcatacgggcaagcacatgagcgccatgaagcagatccagtaagaagtactaaaagcgtccgggaacaggccgtccagcagtgtgccaccaagcaccaacaatacacatggccccagcagacacgacgccatctgcgagacaactgcaaaccagcggccccacttgcccatgcaccactcgcccaggtcgctgtaggtcttgacgctcttaggtgccagcagcatcacgaggcagatagccacagatgaatacacgttggcgaaggccataaagagcaagccgatgacgcctatcacgggccctgcccgcgcgaagttgccaggcataccgagcgtgccaatgccgtagacgcatcagaagatattgagagcaatcttgagatcctccgtggtgaggaacttcccgccgttagccatggttggagttgcagtcgtcgaaagtcaaggcaaagtcaggagaaggaggcgcgcctcacctggcgaaagcggaaatgaaaatgaatcgcgagcaagtccggtgcaccgaggccgcggactgaaaagggagagccgagatggccctgtcgtgaggcatcactgagtgcgagcggtccagcattgaaaagtatgcggagtacactatgggggatgcgcttttgtgaatacgttcatggatcccggccacctgaatgaaagttcgattcagaactcgcgaacgaatcgcaccctgagaccatacgcatgcatgtgtgctcttgcaaggtccttagtggttgtgcagaaacaacgaaggcgcttacatttcggataatccactttcaggacgctttcaagttgcttgagtacactccaacacccgagttaataacgccgtgcgtgtgaagctgtttaacacgtgatcgatcactgaatcagtgactgatcgaagatccctttagattagtcctggctcacaacttcattcaaaatgacacatgggtttcggagaatctaattcgaggacactcgacgaaattgaataggtctccggtggcaacctatctccatcaacaacaattcgttatcaagcaacaaatccacttcaaggcagagccagcggcgagcttggcggtatctacatgatgtagagtctacattgtgagctacacgcagctgtacacgcagcgcacgtgcaccgtgacgagaatgagcaaacgcactaacttagctcagcaataatcgtgaccacttctcggatttcctcgagttcgtgggcgcgtcgtgcatcacgcttatcagcaccctgccgcccattgtcttcctgctgaagaagctgtggaacgagatcccgatctgggagaaggtgccggcgccgatcgtggtcatcatctgcagcttcctgggctgctacgtgacgtacacgtcgggcaaggccctgttcgcgccgacgacctcggacacgtcgttcccctactgcgacagcgaatacgagaacgaggtgtactacaattacaccgccgttcacggcgcgtgagcgatcgagcaagtaagccagcgatagccctgttactacagagcagtgcgtgcatgcgtgcgtagttccgcagcatccaaaatacacattctttgttgagatcagtgaaagccatgtcgttgacggagctggccgttcacagttgatcagagcagttttggtcggtgcgcaaaaggcaagttgaaggccatactgctggcagcactcaacgggcgtcagacacggtactgtttggcgaccttcgcgcaacctgtcgatcgtatgggcgtatttttccgtcgcgtgcatgtgacggtgcgacgatcttggcgtgcatgcaggctttggtatccgtgtggagagacggtacttcagcgtgtccgcgtggcctaatggataaggcatcgccctccgaaggcggggattgggggttcgagtcccctcgaggacgctcttttccgacaaagcttttggtcgcccaggcccaactttcggtccgctcgtgtgccgaacaccacgcggccaaggtgaagttgacgtgctgcagcgcattgcgcacttcgatgctgacctgcaagccggccgaccgccttccccccgctgcgtaccttgttctcttgcatgcacgcacgcatgcatgcgcgcacgcgaaaccgaagaaaagtgaggagctgcctcacccagatcaatcgctgcccagcaaataatagaccaacctccacgcgacgctgccgtcttcaatcgcatcgctccgcactcgctcggacagtctcaggaggaagaacagaatatttcgctcgtgcagcagtggccttgcggttgcgggccgacttgctgctgtgcgtcatagtccccacccgccccgcagacgcacactgcccgtgtggagcgcaagctgcgcgcttttggcagcgccaccgctccgttatacaatgctcggcgccgctcgatccatgactgcttctgtgttccttgccttgcacgatgtcggggccgccatgatggccggtcagaactgcactagcggcttgctctgacaacggtagcaacaactgcaccgccaaaatagggtttagcgttaatttgccatacattttcataccggtagtcgaaacaacacaggcaataatgaccgactcgggcgaaaaagagcccccgtcgtcgccgtcgcagccacgacgctcctctcgtcgcctcgataagcgcaccccgccttctctgcgcgtgctagtgcgcctcttctcagcgctggagttcgggctcggcgccttgacgctgtaccagcacacgcccgacttcgcggccgtcaagcgcgccgtcgagagctcgtgccagctcagcttcacgcctgcgcacctgcagcagatcctgcacctgctgccgggcgcatacactctcgaatggaagaagaacacgcgcacggcgcgccgccaagcgcaggaagagggaggcgactcgcttcaggcccagcgccaacggctcaagcagcagccgccagtgcttactctgcgcaagcagcagctgccaccgcctgacagcgactgcgagagcctcgaggctcgcatcactctattcttcagtaaggctaatacctacttggaggcgcacgtggagacgatcaagaaggagttccccgacatgacggacgacgagttgaaggaggctctgaagctcattgagatcgagaaggccccgctgcccaaggtgccagcggagattgcgaacgatgagagccatgtcgtgttgctcgagaagaaggagagcaacgagcagaagggcgacgcagcaggtgccaaggacaaggagaagctggaggaggcgctcgcgaagcccgtgccgaaggacctcaagacgctaccggaatggctcatcaacaaagttcgcaagcaggagcttggccgcaaggacgtagcagagaatagtgccaaggcgttgaagaagcgtctgctgtcgacgcttccgcagctcagcgatcagctgcagtcgctcgtcatggtcacgcggaaatccattttccccaagtccgaagtgctacgcagactcgcagctcgggctccgatcaagggcaaaatcgaggagcagctgtatatgctcgagtcgctggtgccggagtggctcacggtggtgattgacgacggcaaagagtatatcaagctgtcgaccgggtgcaagtacaacagcatcaaggcatcgctgcgtcgggccatttccgtcgcggcataacctcttcgttttctgacaaactttaacgcaaagaaatacaagcacattttttttactgaatgaactgaaacaatagtatggtatgcatagcattagaccaaggccctcatgataccccggagcatggcgaatgccccacggcaaaattaccgctccaaacttttgcgttaaaagcgatgccgacaaccgagtgtgagctcaaaactgatgtcgaagctgccccgacagatcgaaccggttgacatgatcaaaggtcgtggacttacttgtctgagtcgctgatagcatggcattccttcgctgtcgaaagcttttataatcatcgtcttcattctttttggctgctttctcccgaatgtatcattatcattccacagcgtgagactgcgccgaacgtatctcgcgcggcggttgtaaatcgcagcgaagagtatggagagcacgacttgtgcctatgcgcaccttgtgatcaaggcccctttgctgaagacacttcacctggaacccgacattgatgagctcttgctgggcgggcttctgcggttcttcaatgccgaacaacaccacttgccaatgacaagttgtcattagcggaacttccgtttcccgtcgggcctgcttgtcgaaacctccacacttgcgtcgtccactgctagcccacgctgcagactgcctttttaacagtccagaagcgcatgctgccaacgccaaagcccaaaagagctccactcttccagatctcgtttttgcctccatcatcacgcgctgatctaaatagtggatccttgacacacttgataaatgagacccccaacgcgcggatgcagcatcagagactcaagagtgcgcacagcattgagtccaacaaagccacagtagcttagcccgtcactggccagcagtcccagtttattccgcgatccttcttgctttcatcactggcgcccgtggtcaagtatgtgacgctgcgcatggtgaagttcgtttcaaggttcaatggcgccattgccgtgtccttcgagcatcaacttagacatgccagcacgggatcgcgagccacggcaggcctcgccagcagctgcagaccaggacgccaagcagcgttgttatcagactcgaggcgtttgattggtcgacccagcggctgttatccagtttcgcaggggacggggacagcagccacatcaatcccggcgcacacatcttggcaccgaaggtgaacccatacttcgccagcgagacctcttggtttctgtatgtggtggatcgatcgaggtttttgccgaaaaacctcgccccgcgatttgacttggattcagtatgtgcgcagactggtggaggacgtgagtttcgcgactcccattcgctgccccgcgcccgatagtcggtaaagttcccttcgcgcacgcaacttagacaagatggtacgttgatatacatgtctgcagagccgcggccggcgccgcgccccaccgaacgcgatcccacgaccctcgacctcctcccctgcttctttccgcgcccaacggcagcctccgagaggataaatgagcccggacgcgcaccaaactgagtaaaatgaagccaagttgcgatctatcactgcagcgaccgccgtagcaacaggacggacctaggaacttttatacaggcggggcagagcagggagaagaccatttaagggactgaaggaacagggggcggcgccggaccgcactaataggctttttcacaggacgcagagccagcttaactgacaggacttgatgcacactttcaggcccagaacgtcccggaattcaagctcatcctcgtgggtgacggtggtgtcggcaagaccaccttcgtgaagcgccacctgacgggcgagttcgagaagaagtacgtggccacgctcggcgtggaggtgcacccgctgaccttccacaccaacttcggccccatccgcttcaactgctgggacacggccggccaggagaagttcggcggcctgcgcgacggctactacatccagggccagtgcgctatcatcatgttcgacgtgacgtcgcgtatcacctacaagaacgtccccaactggcacagagacctgttccgcgtttgcgagaacatccccatcgtgctgtgcggtaacaaggtcgaggtgaaggaccgtaaggttaaggccaagcagatcacgttccaccgcaagaaaaacctgcagtacttcgacatctcggccaagtccaactaccagttcgagaagccgttcctgtggctggcccgcaagcttgttgggtacgtgtttattattggaacctttggcatgcgtatgacccgatcttgtttattgacattgttttgtgttttcgttacttgcagtgacaacaacctgaccttcgtcgaggcccccgctcttcgcccgcctgaggttaccatcacccaggaacagattgcccagattgaggcggacgctagctctgctgccgccgctgtgccccttccggatgaggacgaggacctgtaagctggaaatggtgtgctgtcctatcacgcctcgacctgcacttttcgcttagaactcaaggaggagaaacgaagaaggtcgacgcagacggagttgctgcgatgttgaagctgagcttgatcgcgcgcgtccctgctgcatcggccgactggtttgctgccgctgaggtgatggaacgctgagttcctttgaaacgattgacaaccaggagacgaagaagaggaaatagtcgcggttgaatgcatgttgctctatttttgattgctttacgactagcccagctcacaatccgatttcgttacagagtagcggcaataagaaagggtcaacaacttataattctgacaacacataaatattgaattacacagggcctctatttaggtactgagtttgtcaaagtgatgtggcacacacacagcagtcaaggttcccgcgcatttttcaaactccaaggacggagccggcccgatggacgatggacttcgacgctacaggctcgtcgtactcgtcttcctgaggcgcgcgaccttcaaatacactggctgcgactcactacgacgccctacttgtccatggccaccgcacattactgtagctacgtctcggcggtgtgcttgctgagcttgtgcaaacccaacatatgcacgtaggacaacacctccgcatcaacctgcaggcgctcatggtcttccttagcggcagttttcggggcaatgtgggcgagaaagtaagtgtgacgggagcactggggcgctgaagcagaacggtcgttgatgcacacgcagtggttgagccactgcgtgtacacggagccactgtaaataataacgtacctaacgtgtttcatttatttcgttaagtcaatacgtttaacgcaagatttgatttgacttgattattgtaaataccttcagtactttaatcgttgaaccccttcttattgccgctactctctgtagttagataaaccttgcaagatcaccttgcttgcctgtctgtcagagtgtgctaggtcttgttgaagtaaaggattgccaaatgttgtagtcaagcatcaagcacggcatgcagatagctttccggcgtattgtgacaagaaacatttgacctatgattcgatacgcgataagaggcattcgtgctatacattagctgtatagaagtggatcggcgacgtataacgattcgcaggtaatatagagacttttgctaaggtcgcaagaaatactggagagcctagctcaactgtcaaacagttattttctcgaggcgcgcgatggccggcgaatgctcgctgcacttgcggcctctacacgacgacggcaatagcgaggactcgggtgcatacgtgcactgcgtctctccaggcgacgcggagcgtctaccgactgacgcgtcatgcaacgagcgagacggagaagaaagcagcgctgctgagctcaagctggtgcgattcgcgccaggaagcacagatgaagttgtagtcgatgttggcgacgaacagagcagaaccgaccttggccacgacagactcggcagcattcttcacgcgccagacatccagtggacactgaagacgcgcgcgtttcgcacgtgtcttgtgttggccatgccctgggctgcctacgcaattcttggtacgcctaaggagctagaacttttgcagttgatgctgttgggtgctgactattgcttactacagacacagtcttcacgaatacgcggatgtcgtacttggagtccatgggcatctctgactttgtgccgcgatttgtgccgagtctcatccagtttttccttggaccaatccttggcgccatgtcggatcgctctctgtcgaagtatggaagacgcaatgcctttttgatggcggctgcagtcatcgtcactgtgacagggttgctgtatgggtcagccaatgtgttgttccccaatttccaagacttgacgaaactgcttcttgtgctgctcaccgttggtgtgctgctattgaatgtaggtctcgggaatgatgcatacttacgctgttggaggtttccactaactattgattctatttgcttctagatcggattgcgagctcgcattatggatatggtgccgatcgagtttcaggttcatgcccaagccacgctcgcgatgtatgaaggcgtgggtgctctgctcgggtcgcttctgtttaggagcacgtccgacgcagtggtctttgcgagtgctatcagcggcaaggagatattgaaagcctttggattcgccatggccgccatcttcattaccactacagtgtgtatttacttgcggccagagcatcctcaggacaaacccatatttcaacctcggctcacccgcgtcggccgtgaagcgtggcagcaagttgtgcacgcgccgaaagtctttcggtttttatgcgtcgtgtactttgtgctgtctttcgcttggttaagtttttcggatggagtttaccaatggtggggcgcgaacgtatacggaggctgcaaagctgcaggtactgtacgacagcttttgctctctttcagtgtgcacaagaaatatgacggggtgtttatgatattgtgcaatgtagactgcgacgataacagccaaattgcttacaagagaggactcaacacagcgaacacagcgcttatctctcagaatggcctcatggcggtgatttgcttcattgtgctactgatcatgccacgagttcccgatgcaagctacctcaaacgcttcaccgtgctaggactcgcgatcggaagtacgtcctaccgcatctcgacaacatttttcaggcgggcatgcgtcactaactagtatttgtgtctcctgcttgctttcgtaatgcagcctgcgcgctcgtggttgcagtttcagtggggagcttctccaaggaggtggcgtttgccagcttcgtcattacagccttttaccaaacggttgcgaacatctttcccttttcgatcgttggaatcatgggcaaggagctgcagacttcggttcatggattcaacaacaacggactctacgtcggagtgctcatgctgttcgaagcagcgtcagacttgaccgtacaagtctatggtaccgagagcttgtcgccgctgggcgcgggaaatgtgctcacactcccgtgcatcctgttcggggtcggaattgcgtgtacggccagcttcgtggcaatgcttgatcgtcgttgacgcacctacatgtacacctttaggaacatagtatcgagtactcgtaggcaaggtaattcttatctctatctatatggcggatctcttttttagagaccagctcatctgtctgctgagtgtccacctacttccccaccgtcctgatcaaagaacggcagctcgtcctcgatgcaggcgcgagaacgccaccacagacgcagcgacactgaaaatggagaccgctaggccacgcccggagctgccgcatgagctggcggtggcccacgacgatcggcacagctacatgcagcgcatgcactcgctggcaggacccggtgcgtacagcatcccgtcgaccttcgagcggccgacgcccaacctgctgctgcgcgtggtgcaacgcgagcaatacggccgcgagttctccaggtgcgctatctgcacccacctccgaggtgcgcctgcatcagcggtgctaacggcgaccgcatgcttttgcagacagaagcgtctctcgacagcaggttcccctgcggcggtggagtctacggccgagtacgtggccgcagtccaagcggacctgcataaacgccgctccgaggtctccgtttgctggatgcactaaccgtgattggtcccgcgcccaaataggcctccgtgccagctctgcctcgtcactgcggccgacacgcatcgagcgcgcagggacgagctgcgcaggctgctgctactcgcaccggtacgatgcatcggaccattattgcgttcgcaccggactgcttctcactcacacttggtattggcgtcttgcgtctctgggtttgcttctgttgcaggtcaaccgctggtgcgaagacgcgtcgtcttcgtcgtcggagcagcagctcgccgcggcggacggcaagcagcgaagctgcagcccgagagcctcgccgagaccgcgcaccgagtccccgtcgcggcggaaatgggtttccgacgagcttgccgacatcgtggcggacttcggcgagcagcccgcagacgaacaggacgaagaagaagagaacggtgccgccgccctcgcagctcgcatgcagcaacaggtaagcaagcggagcggaggaggcggtgttcagcgcgaagaggaggggtcttgtcttgtatacacgtcggaactgacgccgcggggatgcgccgtgtgcttccatttgacgcaagcagctcgggtccttccgcgcgccgttgacgtaccagcacttcctcatgagcacgagctacctggagcggctccgcaggcagcagcagcgccggcagcaacagctaaggcagcaggaacaccactagcagctcggccatcgccacgtgtgcaggcaacttgcaggcaatctgaaggattggatgaggagcagcgctgctgctgcaaacggcaagttgaagctgggcgtccagcaatgctggcgtgttgtacggctttttgcgtcatgggcctgatttcgccggtgcgcggccgcgtcacaggcacggcaactcaactgtgctggggagatcatgctacgtacccgccatttggtccagtttggctacgtatggcaaaagtggaccacacgatggactaaaattgtaaatatcaataaatcagtagatgcggtaaataagcccaggtaatgcagcaaatcgagagataattctactgcgttagggtacaaacgtactgaggctgacgcgccggcgtcacttcatgacgtcattcgtgccccttcgcccgccaatgggtcccttcagctttgcccatcccccccgatccaacgcatcacttacaaaacccaagtcaattctgaaccgctgacgcggcgccccaagcagcgggcacggaccatttcggactattttgccgggcccggactattttgccgaggcgatccgcatccggcccagcagagggcatttgcgattttgcggcgtcccagtcaccggcccctcttcctcgagagctctcgacccccgcgcacacagaaccatgtcggccaaggcgatccgcgagttcgacggcaagcgcatcctgtccacgagcctgccggccttcaacctcaacaagcgcttcgcgcaggtggccgtgagcaagagcttcgccggccagagccgcgaggagttcttcggcgccatcgaggccgccagcccgtggctcacatcgctgggcgagaccaagctcgtggtcaagcccgaccagctcatcaagcgccgcggcaaggctaacctgctgctgctcaacgcctcgtgggccgaggtgcaggactgggtctgggagcgcatcaacaagcccatccaggtggagaccgtcacgggcgtgctcacgcatttcatcgtcgagcccttcgtcaagcactcggccgccgacgagcactacgtgtgcatcgtgtccaaccgcgacggcgaggagatcctcttccaccacgagggcggcgtggacgtcggcgatgtcgacgccaaggccaagcgcctgcaggtcggcatcgagtccgtggcctccgaggaggaggtcaccgccgcgctgctctcctcggtcgaggaggcgcgcaagcccatcctggccaagttcctcgtgggcatgctgaccaagttccgcgagctgcacttcgtgtacatggagatcaaccccatcgtgctcgtgggcgacgagatctccgtgctcgacatggccgccaagctcgacgagaccgccaacttcctcgtgggcgaccgctggggcgagatcgagttccccccggccttcggccgcgccaagttccccgaggaggagttcatccaggacctcgactccaagacgggcgcctcgctcaagctcacgatcctcaaccacaccggccgcatctggaccatggttgccggcggcggcgcctcggtcgtgtacgctgacacgatcgccgacctgggctacggccacgagctggccaactacggcgagtactcgggcgcgcccagcgagacccacacctaccactacgccaagaccatcctggacctcatgacgcgcaacttcgacgagcgcggaaaggtgctgatcatcggcggtggtattgccaacttcacggacgtcgcgctgacgttcaagggcatcatccgtgccatcaaggagtaccagcagaagctcaaggacaacaaggtgcacatctgggtgcgtcgtggtggccccaactaccaggagggattggctctcttgcgcgacgtgggtgaggctacgggcgtgcccattgaggtcttcggcccggagacgcacatcacggctgtcgtccccatggccctcggcctcgtggagaagccctcggcggagtcggtccaggccgctgctgccaaggccatcagcgccaccaagccgagcaagcagacctcggaggccaacagtgctgtcaacagcgacaacgaggatggcgagagcgccgatgagtcggagagcaaggccgctgccaagaagcaggcgccggtggtgatccaggacgagggcatcgtgcgcatgaccgacaacacccgctgcatcgtctacggcctgcagcaacgcgccgtgcagggcatgctcgacttcgactacctttgcaagcgcaagacccccagcgtggcggctctgatcttcccgttctcgcccaaccactacctcaagttctactggggcacctcggagcgcctgatccccgtgttccagaagctgtcggatgccgtcaagaagtacccggacgtgagcgtgctgatcaacttctcgtcgttccgctccgtgtaccagtcgacgatggagggcttcgagcacagcgacactatcaagacgcacgccatcattgccgagggtgtgcctgagcagcagtcgcgcctcatctcgaagaaggctcgcgagctgaacgtgggcatcattggccccgccacggtcggtggcatcaagcccggctgcctgcgtatcggtaacaccggtggcatgctggacaacatcgtgcagtcgaagctgtaccgccccggcagcgtggcgtacgtgtccaagtcgggcggtatgtccaacgagctgaacaacattgtgtcccagacgacggacggcgtgtacgagggtgtggccatcggtggcgacaagtacccgggctccacgttcatccagcacctgctgcgttacgaggcgaacccggaggtcaagatgatggtgcttctcggcgaggtcggcggcactgacgagttcgctgtctgccgcgccatccagtcgggcgccatcaagaagccgctggttgcctggtgcattggtacgtgcgccaagatcttccccttcgaggtgcagttcggccacgccggtgcttgcgctacgggcgagtccgagaccgcctcggccaagaacgctgctctggctgctgccggtgccatcgtcccggagaacttcgaccagttcggcaacgctatccgcaagcagttcgactcgatggtcgcgtcgggtgcgattgtgccgcacccggaggtgccggtgcccaaggtgcccatggactacgcctgggccaagaacctcggcctcatccgtaagccggccaacttcatctcgtccatctcggacgaccgtggtgaggagctgcgttacgctggcacccccatctcgaaggtgttcgagcaggacatgggcgtcggcggcgtcatcggtctgctgtggttcaagcgcaacctgccggcctacgcctccaagttcatcgagatggtgctcatggtcaccgccgaccacggtccggccgtgtcgggtgcccacaacacgatcgttaccgcccgtgccggcaaggacctgatctcgtcgctgatctcgggtctcgtgacgattggaccccgtttcggtggtgctctggacaaggccgccgagatgttcgcgagcgcgcacgactcgggcctgtcggccgctgacttcgtggtggacatgcgccgccagaacaagctcatcatgggtattggccaccgcatcaagtcgctgtcgaacccggacaagcgtgtgaccatcatcaaggagttcgccaaggccaacttcccgtccacggacgtgctggacttcgccctggaggtggagcaggtgaccacgaagaagcgcagcaacctgatcctgaacgtggacggctgcattgctgtctgcttcgtcgacctgctgcgcaactgcggtgtcttcacgctggaggaggccaacgagcagatcgagcacggctgcctcaacggtctgttcgtgctcggccgcagcattggtttcatcggccacttcctcgaccagaagcgcctcaagcagccgctgtaccgccacccgtgggatgacatctcgtacctgaacgaggacttctagatggacggccgggcattgcaatgcgcagcaagcagtacattccgcgcagcaagtagtagatgctaagtagtaacttctgaatgttttcttcataactatccgctcttctcctttcgccttccgtctctcctcttcatgcgctagcagcaacagtagccgtagcaacggcagggctgctctcctcggacgagtgtagccgctgaatggccttcctgatgcgcaaccggtgtgcaaacttggcgatgccgacctcgctcatggcattatccacgtcgtcgtcgctctctagctgcgccaggtcctctaacgtcaggaatccatgctcctctaattgcttggcgtacacgcagtattcctccggccgagaggtgtcgatccccgcgagccactctcgcaggaggccgccgtcgcagctcccgtcgtcgtcttgaaggtccagcagcacgctctcgccccccgtcttctctggagagatggcaccagccttctcacttgcaccgtgggcgagtagctcgtccacgctgagtcgtctcacggtctctacgtcgagcgtctcgctgctcttgaagtgcttcctcgtggttttagtcgactcgaggatctgatccagcgccttctctgtgtcggacgccagcgtcgtgaacgcttcctgctccttctcgggactcgccctcttccagtgtggggctgggttgcttttggctcgcgcgcgctccgctcgctcttgcatcttgcgctgcttccagcgcgacggccgcggcgcctggtcgttcgccatcgccggcccccacctcatgacgggattcgccatcgcgccgccctccatcacgcggcgacgcagctccatcatggcggcctcggaaaagcgctcgtcttctgtcagcagggcctccttctgctcttcattgaactgcgggcggcgctggcgcaggcggctgaagcacgtggtgaaggccgccgccacgttggaaacggcctcgctcgccacctcgcgcgggctcagcacgaacggcagactcagcgccaccaccgtcttaaccacggcgcgcgcgcagcccgtgggcgcgtcgctggtcgcgtccatcgtggcgaagcgggcgtccatcgctgctgctgctgctgctgctgtgtcacgaagtgactgagtgagtcgcgccggttcaagatccaagatccaagattctatggaaggtggatacttatgtaaaatggctacattgtacccatgactcaaattatagaccaggtgaaattggtgcatactcaattgatctatttttgctcccgcgaatgactggcgcaaacgcgcctcaaaaccaattcctccgcatattcgtctccgacccgtgatccgcagaccaagtcaccatgcacctcatgtactacctcggcgaggacggcaagcgcgtctacacgctcaaggtgcgccgctgtctataacgtcttccgcactgcttgtgcgctaacgttgtactattggtttgtactctgccgtgcagaaggagaccccggccggcgcccccacgtgctcggcgcacccggcgcgcttctcgcccgacgacaagttctccaaggagcgcatcaccaccaagaagcgcttcggcctgctgcccacgcagtcgcccgacccgatcttccagtaagagctgccgacgaccatgttgtggggtggcgacgccctcgaagaggagggaggtatgcccctgccttcccctttgaagcgcgaccacttgcagtgctgtagatttatagacctaacgtaataacacccagtgacctcaacgatggacgtctgcagcttcggtgcgtgcagggactgtaaccccttctacccttatactgtatcaacataagcaggttctcgactccaataatcagagacacaatagtccggcaacgatggagttgatgtcgagcagcgaggatgaaggcgactcgcccacgtcgctgtccacggcgtctccatcgcgcccgaagcctccgccagcggccggcagccaagacagcctcgaggacgagctgctgagccccacaacgcgcaccaaagtcagcagcagcagcgcagagcggaggaaggtccgggaccaacctgtcggccacaagcccgtgatctctgcgcgcgagctgctgctgaacttcctgccggcttcgaagcgcaagcagcaggccgcgtcacccgctaaaagcgccaaagtcgcggccgtggacgccgcagtggctgcgtactcgctggtcacgcccaagaaggctgctcctgctgcacccagagcggagcagaaggaggagcgggagctcacagccagcgagcgcattgcaaggaagtacgggctggccgcagccaagacggcgtccaaggacgcgcccacacgtgaccgcagtgcgtcgtccagctcgacagcttcccgtccgacggctgcaagtcgctccattgggtctggtggcggtgcaacgccgaggaaagaggccgcagcgtcgcccgtgcagcagccagtggagaagtcgaagaagaggtccttctgggacgcccagactgctggcgtggactccgagcagccagcgcagaagccgacctacgtttcgccgttcagcgacccgaatgggttcatgaacatgaagaagcggaggcaacggaggcagcaaccgaccgaggaaatgagcgaggaagagatgaaatcggcccgtgacgctttctacgacgactcgaagagcaaggcgcaggatgtcggaccacgtccgcgacacattatcggttcggccatccccgagctcgacgacgcagacgactggatgtcggattcgaaggaaatggtgtcggacgatgaagaagttgcgagaaaagtggtcgcagcggtggatacagagacgctgccttctcctcgtcgggctggcgtgacattgagtcggcagacaactcgagagaaacgagcgccttccaagcgaccaacgcggaagcgactaccaaaggaggaaagcgattcaagcgaggacgagaaagaggcctacacgagcgagcgatggccgcagcttgatcctccgacggtgcgatctcctcatttttacctttcgtgcaccacgacgttgagtaacgttttgctatctgtttggtcaggttgacgctggtcccatgattctgtcaggttcagaggaagcaggaggtaaacctcttgaagtgtgtgcgaacctaaacagctatttgttcgactatcagcgtgaaggagtggagtttctctacagcgcctatcagcgcgacactggcgcaattctgggtgacgacatgggtctgggcaagaccattcaggttatcgcgttcctgtcggccgttttgggcaagcacggtgattaccgcgataaagacgcatggaaggcgttgctgcaccagcgccgggaacggtatagcaacaccagtggtggccatcctgaagataccggcttcagctttgctggagaggttgcaccgatatttattgtgatgccagcatccctgcttcaaaattgggagcacgaactacacacgtggatgagctgcagcactatcattctgcgagggaagcccagcgaccgtaacgcaatgattgaccagattgcaaggtttggttgaaattctctacagatgtggcttgctgcaaggttggagctcacactgaagtgtttcgtgttttgtgttgtgcaggggcgaatacgagatcgtcatttgcagctacgatattttgaagatgtatctggcccggctgcataaaatcccgtgggaaatggtgattttagacgagatgcactgcttgaaaaaccctgaggcacagctgactaaagctgtcaaagcaatcaagtgtaaacggaagcttggactcaccggcacactgatgcagaacaacgagaaagagctgcattgcttggtagatacaatagctccgggggcgattgggtcctgggcggagttcaggatgtactatggagatgatatcaagtacggaagaaagaagtctgctgcccctgaagccgtcaagcggagtcaccagaaagaaaaggaactccgcaaaaagctgcggccatattacttccgccgagagaaggagatcaatccaacattccaagaggttaaaaagagtgaccaagtggtgttctgcgacctcaccccacttcaaatggctgcatacgagcgagtgctagccatgcctgagtttgagctgcttcggcgaggagaggaacagtgcgattgtcgtcgtgatagtaaggagaagcgaaagaaatgctgctacaagactcccatggacttaggtgatgctcctgggttgctatacgaacgctttcacgaggatggagcgtgcaagaactgcccaaattgcatgggtcttccgtgtgttgccatgctgttgaagctatctaatcacttggagctgctcaaggtgaatccgcacgacgcaccggagcttcagcattatcaagctgagtttgcaagaacagcatttggaagcgaccttgacgttgttggaggtgtgaaccaggtgtcaagttttcaggaaatgtgcgcgatttctacaaaaacttgcgggaaaatgatcgtactggaaaaactgttggcggtatggaagaagcgtaaggagaggacgctgattttcagtcgaagcactcgaatgctggacatcatccagctctttttgatcacgaaggcaaccaggtacagcaggctggatggaaacaccaaggtggaggagcgtctgcagatggtgaacgattttaacaaccctggcagcaatacgaccgtgttcctgatcagtacgagagctggcggtgtgggacttaatctacagagtgccacaaatgtcgtgatttttgaccctagctggaacccatcccacgactgccaggcccaggatcgggcgtaccgtatcgggcaaacgaaggatgtacaagtctacagactaattaccttgggaacaatcgaagagatgatctacgtccggcagatttacaagcagcagctcagcgacacgactttgaagggcgccaatgcaccgcgatacttcgagggcgttcagggcaaccctcagcagcgtggagagctctttggtattgcgaacctgatctgctggaagcctggtggtgtactcaaaggtattcaagatgcgtaccagcgtagccgcgacggcttgataattcagcagaacagagtccgatacgatggtactgcgatgagaaaacccacgaagaagtcgaccccgaagaagcaacccaacgttgtggatgatgacgaaggggagatgatcgaagtggcggacgagttggtttccgatatgctctcggccgatgagccgcctacacaacccactcccgaaggaaaacctgctgctgtaagcagtgacagcggtgatgatgatgacatggacgcgttactgaatggagccacgacatttcgccacgaagagatcgtcggtgaacaggacgatgagcatgaagcatatcacttggaaggcgacacggcagtgatcggcgaatcggaatcggagcaagatgtggcagctccgagagaagcccccgatcaagatgtctctggccaacaagcagcaccagctcattcaactcccgtgaagtcgcgtggcagcattttatcacgcatgaaggacatgaaaagtcccaacggcgactcgactccagacgaacccggtcaaaagagagtctacgtgccgacatatctgtaagttcaatgagatgctactgcgataacacctcatcgaagttggaaagtgctcgggtgttgttgtgatacacttatttgtatgaactacagagcgagttatacgagcactacgacaacgtgttaactggacctggcgcgtgtgtggtggcgacgcgagtttcgcgagtgtgcagactttcgtgacactgaagggttcatagctgcgtgctcttggcagatctccctcgctcgacccatgaacgaagtggtggtgattggcaccatcccgagcgagatcatcctcgtgatgacgctcgaaagccccagcatgagctccggtgtcacggcaccgaacatccagcccagagctgcgaattggtacaagaaggccaagctgaacgccacgatgaggcagcacttctgactgcgcgaaaagccgacccatagcggaatcgagcgcaccaaatacccgatgaacgccacaaagcagcagctctgtcgtcacgaacacgaacgaaccggatcagtgctatcgaataccaagagaagctgaacgggagacggcgtgtagtaccagctcggcgaagatgacagagccgtaaactcctggaagattactgccctcggtcatagccagcgtgacccatgacatggatggtgctgtttcctgggaacgagaagggagagcggtgcaatccacatgactgtaagtgcgaggaaaaactacgttgaggaacgtgggagtggcctacgcacctggagaattgcagtgcttgagaactcgtcctcgtctaccccctgcggacaaaaccatcgcgatatgagcgcccaaacaacaacagcaaccgtaacggatggttgcgttacctggatgcccgagtcaaggtatttcgtcggggataacagggagcgtggccagcggtagctcctccgattcagcttgctttgggtcgtgaagctccgagtcaaactcgacgagacgtgaaggttgctcgctctcaagttggtcgtggtcgcggtagatctgcgtcttggccgttcggaagtacagactcgggtcggcacctacgacaaccgtgccgtcggtacccagcaccacgtgccgcgggttgtacgacgtcgccatcgtcaccgaagctgccaggaggccttgcagagcgtacgccacacgcatctcaactgttgtttcgtcgactgctgctcgattcttgcgttatgaggtggttcgaggcgctgggcgttgtctcggggggaggccatgaatactcgaagcgttactcggctcaagagtatcgaaaggtcgatgggctttgcgtccctcgagcactctccgatcttttcctgatcattcatcgagcaggataaagcccacgatctatcacctaacgagcgatgcgtctgcagcacttgcagttgcctgtgaaccaccacacggagatcgtgacggcgtgttgctggacgcccgagaacgacgcgatcacgtgcagcgatgacaactccatcgtgcgctggcgaatggacggcgaagtggctggcgccgtcgccaagatggacgcgttcgtcacctcggtgcactgggtcccgtcggtgggcaagcagagcgccgataccttcgctgtatcgtgcaccgacggcaccttccggctgatctccaagagcggacgcgaggagaagcgcgtgcaagcctgcgacgctggtgcagtcatcgcattgaagtggaactacgacggtacggcacttgtcactgcgggcgaggacggcacactcaagatctggtcacgcagcggcaatctccggtcaactttggcgaccacgggtcggtcagtgtacgacgtttgctgggggcccgacagcgaccagctactgttcacacacggcaacaacatggtcatcaagaccgtgcaactcggtcgtaaggatattcagtggaaggcccacgacggctccatcctgtgcttggactggaatccgatcaacaaccgcatcatttcagggggcgaggatcgcatcttcagagtctgggacgccttcgggcgtcaactgtaccaaagtccggcgggcgagcacgtcgtcacctccgtggcctggtgtcccaacggtagctgcttcgctgtgggctcctacaacatgctgagactgtgtgaccagacgggatggtcgtactgccgccaacgccctcagagcggctcactcatggacttggcatgggcctcggactcgacgcagcttatcgctgccggcggcaacggcgcgactgtgttcgcccaagtggtggggcgtatgctgccttggaagaaggtggaggtgacgcttgtagacccacgcaaaatccacgtacacgacgtcgtcaacgagacgctggaagagctcgacttcgcccgggatcgcgtggtggagatgtccttcgctcacggattcctcgtggtctgtaccgctactcagtgcttcatctacgacgctcagagctggaatacgccgcacatcttcgacctgcgcgcggccgtgagtctccttgtccagagcgagagccacttcttgaccgtggacaacttcaacggcattcaggtctactcgtacgaaggcaaaactgtgagcaacccgagattcccgggtcttcacgtcgagttcctgagccatcgcaccatctcgctcagcagcgacacgctggccatcctagaccattcggaccgtaaaacgatccggtgcttcgacttgaacacgggcaagcagctaccggtggtgataacgcactcgctggagatcctcgagctgtcgctcagtcgctttggccccatggaggaccgcaaactcttcttcatcgaccggaaccgcgatatgtacatctctcgcgtggctagcaagggcaacttcaagctgcacgcgcaggtggactctgcggcgtggaatgacgcatcggagctgctcatcgccatcgccgactccaagttgctcacctggacgtaccccaacatggtgtatgtggaccgtacgctgcttgcagacatcgtcgagtctcgagacgccgccgacttcttgaagatggcggccatcaccagctttgtgggctccagtgtgactgtgcggcgcgctgacggcactacactcgctgccagtgtatcgccctatgcccccatgctgtacgagttcacaacttcgggtgactgggacaaagctgtccgactttgccggttcgtgaagagcaagagcctgtggacctgcttggccggcatggcactgcatcgacgccaccttgagactgcagagatcgcactcgcctccatcgattgtgtggacaagctctatttcgtgctgcacgtcaagagtctggcctccgacgagcgtcgcaatgctgagttggctttgtactccggcaacgtcgacgaagccgaggccatcctgctgcaagcgcaccccactccgctcgtgtatcgagctatcaagctgaatctgaggctattccgctgggaacgagcgctggacctggccatcaagcacacgacggacgctgggactcatgtggacacggtgcttgcctatcgggagcgattcctagcggcaaacaaactccaggagaccgacaagaagttcctgcagtactcgaagcaagtcgccatcgactgggagaccatttccaagaagaaagagctcgagagggagaaggagcagcaaagcggtggcggcagtcgccgcaagtaggatggtcctctttcttgttgcgatgccagctagctcctttccatctactgcgtgcctaaaagtgaagaccaacaagactagcacaacatattaaaaaaagaggaaataggcctacatgcatactcccttcctgcttgacaaaagaacgcgccgaggcgaggaagatagcgaagcagcgcgcgatccgcagctgaggcagcgtgctctcccacttggctctgatggccccctcgcgtgcctcctgctcttgctcgcttatacgtgtgtagtcgtaactggcttgcttgcaccttgtcttgccatctacgaggccctcccctgtggcactcatctaccgactctgtcgcccctctcagcaattgcactgctctgcggtgttttccttcggtggcggtgccgccgtcagcttaatatcaatcactgccgtcacaaaaaccaccacgccggtcagtaaagctgatccgataagcaatgcaggcagagtgagggccacgtacggttagagtctccgctaatcatggtgttctccatgccgggcagcaccgtcgcgagcttgcggaagagcgccttgatgttgtatccggccttggcgctcgtctcgatgaacatgacgttctcctccttggccttgtccgagccctcctcgatcgacacctggcgccggtccgagatgtccgtcttgttgcccacgagcatgatcaccacgtcctgcccacgctccgtgcggacgtcctcgatccacttgctcgtgtttaggaacgacgcgcggtctgtcagcaacaaacagcagcaatagccacaacagcatcagcacgccgcaatagatcctcttgagtcgcagagccctcacttgtgatgtcgtagaccactacagccaccgacgagtcgcggatgtagctggggatgaggctccggaaccgtctgcgcaacatacacacacagcagcaacgtaaagggtcagagcagggcattggatcgcgcgtgtatcgtatcccccaattgactcactcctggccggccgtgtcccagagctgcagccgcacggtgcggtcctccatgtacatggtcttggagaggaagtcgatgccgatggtggcctggtacgcgttgtcgaacgtgtcgtacatgaagcgcgtgatcatggacgtcttgcccacgccctggtcgcccaggaagaccagcttgtacttggccagcggcgcgatctgcggcacgttcacgttggcgtccgacacttcggtgtccgcggcgtcgcaggcggcgggggccgcggccgcggacgcttcggcggccggcgccttgtcctccttgtccgtcgcctcggccgtcgtcatcttgctctaactatgccttcttcgataggtatcaccacaaccccgggccgcgcgaacgacgacacatggcgctggtgtgcaccacaccaacatctatatttgtgtgatttgtaccggactattttctgtcagccaatcacatgacagagtacacaaaaatgacagtcgcactctgtgtccatgttacaatcggctttcagtacccgaacagcctcaagctcaaggccaaagcagcgataccatggaggaagctgctgctgcgcgccgcggggccgcgcgcgccacgcgatccaccgccaaaccatcgcggcgtgacatcgtaaagcctgccaatggtggcggcggtggcggatcgtccgcggacgaggaagacgaagaagaagaggaagaagaagaggaggaggagatcgaggaggaggaggaagaggaggagcccccagtggacgaggcggacgaggcggagctggacgccatcgacgccgcctaccgcatctcgcccacggcccgggagctgcacacgctggagcagggcacgctcgtgcgcgtgctcaagacgcccgacgtggagcagcgcgtgccccacacagtgcacaaggtcggcgtggtggaggaggtgccgctgcaccccaacacgtggttcaaggtgcgcatccgcgacggcgacgtggtgtacaagtaccgtccgtcggcgctggaggtgctggaggacggcgacgacatcagcagtccggctgcgtcgcctcaccacagccccgtgctgcatcacgaggcggaagaagaggaggagggagaattcgaggagagaagagaagatcgccgtcatcacgacgacgacgaagaagaagaaaacgaacagaaagaggaggagcaccttgagccgggcacgcgcgtccatttgaagttggacgagctgttccgaggcgagcgtcatctcaagaagtacgaggggaaggaaggcgtggtgaccggatacgacgagggggtgatcgtgcagctggacggcagtgaggacatctctttgacggtgcgtcagacgcatttggcggtggtgccggacgaacctgatgacgaagacgaagaagagggggaggagggacgccaggccgacggcgaagaagaagaagaggaggaagcgaaggaagaaaagaagaagccggccaaggtccataagaagaggaggggcaagggaaagctgctctccgtgctggatccggacatgtggatcgaccgcaagtgccgcatcaacgtcggcaagttcaagggccagcacggccgcgtgctgcgctctggcaacggctgggtgcagctgaagctggagaactcgagcgaaaacacggccaagcgcgcgtacgagctgactcttctggaggacatggagaccatcaaggtactgcacgccaagactctcgagaaggagcgcaagcgccgcgctgaaagtcgagccaacggaactagcagtcgccatgacgacgctgacgaggaaggtgatgacgacgaagatggccacagcggtactgatgatccgatggttggcgaacaaacggaggattcgcagggagaagacaacggccaacgctctcgccgtgtttcaacgcgcggaaactacggcatctcgtggatcgagaagaaggtgaacctgccgaaccgcaagggctttggaattgtaaagaaggcggaccgcgatacgtgtacggtggagattcagaccacgaaggttatgcaagtgttcaagaagaaggatctggagcttgccgctgacagtcacgccaagactgctcgtcaaaacagccgcaatcgcaacaatgccaaggcccgcgagaagctgggattggaggaggacgccgtgctcatgggcacgacgccgtcgcgctacattgcgttccaagacctcgtgaagcggttcgctatgcgccgtcgtgagaagctgaagaagcgcccgaacttgatcgagtggcaggcccgactgaacgtgaactatctggaaaacgggttttgggacaaaagcaaccctgcggtggttgatctgattgtgactcctcagtgcgagatttgtggtgtcgagaaagaggtatggtgtggcgtaggatgcttccttgtgctcaatatctctaatgtgtgtgcgtgtttccattcgtaggacattgatggtcactgctggaacaacgagtgccccagatgccccgcatttgatgtggatggattcgaccccaaggatgaaaatgctttgatgcgagtcccggtggcgccattcgtgaacgacagtatcaccagttcgctgtgcctcaagaaggaggaattgtcaaggaagcggaagcgcaagtccctggacgcaacgcccaccgcaaggggccaagctgatgcagaacaagtcgcgtcacctactgaagagcccaagaagtcaaagagggatgctggaaagaccaagaaaacccgagcgtcatctacggacaaggatgcgaagaacggcgagaagggtgggagaaagaaagcgggaaaatcgtcgactgagcaaggtgacatgaagcgaagcaagggagctgcaaagaaagccaagggtgaaaagagtcccaggacagccgaatccgctgagacgggagaagcgtcaccatccagcgccttccgtcctcactacgacagcgtgttctcgcggtaggaacctcatatgagacagaacctccagcgggtaagtgccgctgctcctgaaataggtttgggaaaacgtttgagcgcgatgtgaatgcatatttcatgttttgtgtaatacgctgccctgccgacttcgtgctgtctaaccgatcgaaattgaagccgtccgcatgttttgtacgcagctccacgtatcttatcgatgctccttgagctctgatccccaaccaaaagtgtattattatctggtggtgacgaaggtgatttcttacaggggcaatcacaattgtggcagagctgacacgaacgcatgctggccccgctggcgggagtagttgagattggaacaactcggctccacttgggcacggcctcatcggcttcatggcgccgaagcgcaaacaatcgcttccgtcgcactctgagggcaagaatgggcttccaccagtcacacccccgcccatgctcaagcgcaagagcagcagcgtgagcgtgttggacatttccggcggtgcctctggcaagggggcagagcagaagggagaactcccacgagtgaatcggaataccagcagccttcaagatcttcgaacggatggaaacaatagcaacgcggctagtagggcgcacagtgcaacagggggcaaacaaggagacaagaagaagaacaaaccaccaaagaacgggtggtcaaatgagactggaaactcgctgccaatggtagcgaaaacttcaggctcccaagacggctcggcgaaaaaggagcgtacgcgtacgcgacggcggcgtgccggggatattactctcactaggccagccaccatcgctgttgtggtgaaataccagtgtacgttgatgttcttgtatcagcttgccaattcaaagctgacacgccagtacatgtacgtattctgatgatgcagtaggacagcacgagctcaagaagttcaaagcgtgcttcagacagatcgatctcgagtacgtcccagctgcagttttgcatgaatgaggaagtggctaacgtgcgtgtgttgttccatgacagctcgagtggtgtgatcgactacgatgagtttttcgagttcattgacgaaacgaagacaccgttctctgaagggctcttccgtatgattgactccgatagcaatggaacggtaagcaacggagcttcttgcgtgaacgtggacccactgctcatattactatgttctccttgcagattgatttcgaggagtttgtccacgcaacggtcttgtattgcatgtacactcgcgatgaaattctccactgtaagtctaatgctcttgattctgggcctcgatgagataacaaactcattcactacctcctgcgcctagtcgcttttgacaccttcgatcctgcggccacggggtccatcggcgacaaggagcttcggcgtcttgtcagcatggtgaacgatggccaatccaaattctcgggcaacatcaacaatgcattggcagagttcgatcgcaacaaagatggtgtcatcgacttcgaagagttcaagaacatgaacaagcgcttcccgatgctactgttcccttgcttccgactccaggaccgcatgcagaaagccacgctgggcgacagccactggctccagcttcacaagcgcttgtacgaacgcctcaaactggagaactaccaggtacagacgacagacaagactgcttctattcacgatacttgctcacttgactgacaaacctgctccgctttccggcttgattaacagcgaaaacacaacggtgctctaccagcgctcactctggtcggtgccatcgtcaagttcctccgactagacacccgcgacgtctaccagccttaagccgagactacgttgaagacgatgtcatgtggatgagctcaagcgggtagatcggcccgccggaggcgatatggttaaaataagtgacaggctcggaccctcgcagcggcaacgaggcgacttggtcggcgcgacaccaagtggctcccgcgctctcgtagtctggaatcgacttaggcggctggtcgcagtccagcggctcggcgtagaagatgaagcgcatgcgcacgtactgactgccgttgcggtcctgtttcggatggtactcgagcttgatcaggcccgtgagacggatgtcgatgccggcctcctccttcgtctcgcggatcgctgcctgcgccgggttctcgccactgtcgatgcgtccgcccggcagccagaagcccgagttggcgaactcctgcacgagcaagaagctgttgtactttttgttgtggcacaccacgagcgcgaacgagtagagcgtgctgtcggccatgttgaactcgctcgccatctcgtgtcgtcccggcgggccgtgggcgttgtgcatgtgcacctggaacgggccgcgcggggtctctcgacagatcgggcacttgatattgtccgtgttcttctcgttgatatggtacatggggcagtggcgccagagctggtcttcgtccatgccgttcttgccgcaaaacgggcacgtgaagccgtcgcgtccgccggatctgcctcggctcttccgtctcgaatgggaatgcgagtcgtagccgttgggctcctctccgcaggaggcgatgaaggccagcacgtcccgcaccgcgtccagcgagtccgtgaccatggacgcgccctcctggaagcactggtagcgccccatggggtgctcggccagctgcggactgaagacgcagaggaagatctgcttgctgatggtgcggatcatgcgcagcagcgggtacaggtggtgctccgacagccccgaggcgcggaacagcacggcgtcgaagggaacgggcgaatacatgggcggcgtctgctggtacgccacgcgccggtcgtggtgggcgctggcgcgcgcgtgcgtctgcatgagttggtgccggatgtcgtcctcgtggttcaccgccagctccgtgatgaagccctgcgccgtgcaggcgtgcacgcacgcgttgtccaggctgtccaggggcatgtcgtggctcgagacgttgcggatcaccagcgcccgcttcatgatcatgcctcgacgcctgtatttgtcgacaataattggtaactcaattttagatactttgtgtgtcaaaataatccgaccaaattctgagctgtccacgaaaggacacaaattgttgaagtggccaaaaagatgggagagcgagactggcccaagagtctgaggacgatactcgagcgtgaagtacactcactgccttcgtgtgcacgtcttatcatcaattgttgctgccctttacatactgaaccatcttgagtattgcagtgctcagcgattttttgtaaaaagcgagaggtgactctgacttgctgagcactcacacaagcgcgacttggcattggccttacgccaagagggtcatcatacccagcaccgaactttacgcaacttggtcattgtttacaatgcgacacagcgatatgttgatgcgactcctctcgatacagtagcaggaccgagtcgagtctgtgccgaataggaaaaatacaaatttcaagctggtaaaacagacaaagagcgatcatatttagctccttctaatgcacgtgctactcaaggtgttgcggaagtatcttagttgtcggtaaggtcgtcgttcaggttcacgccgagcacgttggcgacctgcagcatgtccttatcgccgcggccactgatgttaatgactacaacctggtccggcgccaatgtggacgcgagcttcacgccgtagtgcacagcgtgggaactctcgagtgccggaattatgccctcgtgaagcgagatgagctggaaggcctccagcgcttccttgtccgtaacactcacgtacttggcacggcccgagtccttcaggaacgcgtgttcggggcccacgccagcgtagtccagaccagcggacaccgagtgagtctccagcacctgaccagcgtcgtcctgcatgatgtacgtcttcgtgccgtgtagcacacccggtcggccgcccagaagcgtggacgagtggcggggcgtgtccacgccgtcgccaccagcctcaacaccgtagatggccacgtcgttgtccttcacgaaggggtggaacatgccgatggcgttgctgccaccgcccacgcaggccacgatagcatcgggcagacggccgatctcctcctgcagctgggccttgatctcacggccgatgatggcctggaagtcgcgcacaatggtcgggaacgggtgcgggccgatggccgagccgatgatgtagtgcgtgttgtccacgttggtgacccagtcacggatggcctcgttaaccgcgtccttgagcgtctgcgagccgctcttgacggcgatcaccttggcgccgagcatcttcatgcggaacacgttgagcgactggcgctgggtgtccacgtagcccatgtagacgacgcagtccagccccagcagggcacaggccgtggccgtggccacgccgtgctggccggccccggtctcggcgatgatgcgcgtcttgcccagacgcttggccagcacggcctggcccagcgcgttgttgatcttgtgcgcgcccgtgtgcgccaggtcctcgcgcttgagccagatctgcgcgcccttggcgtgggccgtcaggcgtttggcgtggtacagcggcgtggggcggccgatgtagtcgcggcccaggtgctcgagctcctcgcggaacttggggtcctgcgtggccttgacgtactcgtcgatgaggttgtggtgcgcctggatgagcgtctcggccacgaagcagccgccgaactcgccgaagtacgcgttcagctcgtcggcggaggtgtacacgggcggcgcgttggacacgtccaggtacttcttgtagctggtggcggggctgtcggaggtcatcgtcgtggaaggcaggcggcgaattggcaagtgtgtgcggaagagttcaagcggtgccgccggtcggcctgacgtactcgctgcgaagatgacttggtgtttgtataggtggatgctgccaccggattttggcgtcaacatgagccaccgaatgagccgatgttgatgcgcatttgtacacgccaccgaacaggtgatgtagccatgtggtgcgcaacaacagggctgcgagttcaagcactcaagcacacgtcagggccgccgaaaatagcatggccataaaaataatgggccatcataacataaataaatttattgtggactgaatacctagcacatatcataatttatgcagcgaatctacccaatgtcataatttatgactacaatttataccctactatatatcatttttttaatctgaaatcctactaagtatcatcgttttaccttaaaaaattattggcctttcaaaaccaaccgttgtagtggctggtggcagcctctaagggcgttcaaatgcctgttgttgtcattgttcattttgcaaaccccccagcagcccacaccccagcaactcagtcttcccagctatggtctttgtgtcccgcccgccgcgcccaacgttcacgctggcccaggtcacagggttctttttccaaccgtgccgcgacgactttgacgaagttatccctgagtacttccgttatcgctgcggcacggttcgaagcagacccgccgcaacgggtttaccaacctcatgcagcacgtgaggcgtgagcatccgaacttcgaggccgagatgcttgaggccaccacagcagagacggggtcattgctgagctacgtgcgccgctcctcgcaaaacctctacgggtggctagtctgggttgtcatgagcaacctcccgtttgccttttgcgagaatcgaacgacacggcggtacgttagaagcaatttgatttaccctgattaactatcccgatttaactccatatttctgtttatctgtagctacacgaacttggaccctgtctgtatcgagacgctgcgtgccgtactggagggggtctcgctggtagtcgagaggtcgattgcggcagaaattcctccgcaatttggcctgatcctggatgggtggacccacttgggcgagcactacctcgcggtctttgcccgcttcgaggttaacggtcaggtaatgaccccactgctttgcatggcgcctcttctccaagaggaagacgatgatctctctgccgtggcacatagagaatttctagccaacatgctcccgcgcgactttggtaagcagctggaccagtgtgtctacattgtgggcggcaactgccgcgcgaacaggcgccttgcgacttcggtcggtgtcactcttattgggtgtgcctcgcattgactcaaccgtgcggtgcagaaagaactggaagatcacgaggcggatctttcagatgtgcagaacctgatgaccaagcttcgaacgctgactcaatctgttaaactccggtacgatttacttgtttcggcgtaatattttttctaactctttttacttattatttttactaattcgcgtcagactcaaaacaaagctccgaccggtaattcggcaggacacccggtggagctctactttcaccatgctgcaccgatacttcgagcttttggagcacctagatgcccacgacgatgacattgcagatcttctccccgccccagccagtaaccgtcgcctccgtgcccttctcaaagagctcacggacgtggagtcggtctcaaaggcacttcaaggggaggatgcggaccttcttgatgtgcgcgagtggtttgacgggctcattgccgtcaagctcgactacgccaactatctcggtaagctcttgccggaatctgattttgctaattggaatactcacaatgactattatgtactataacagggccaagagcggacatcgtccacagccccgacttcgagtcgggttgtgtgcgtgtgctactcggcaacaccaaccgactcatcagggctgagaaagccgtacttcggccgttcgccgcgaatatgacgccggatccatcgactgacgacgactctcaaggctccttcgtggagcgtttgcagaaacgcagacgtctcgctcagcaccagcagtagtataaactgcttcgcagtatccctccgacgtccaatgtcgtctagcggttcttcagtgctgcccgaatcacgcttgggcacgagcgcaacggactgcacccgattacgcaggaacaaaatttgttccagcgtcagaacgcgagctattggaacgtatgtactgtaggtggtctgcgtaactaagttaatacaaagttgcgcacttacacaacgccgttatttatgcatggatgatactcatgtcattatttatgcagtgggtttttcttgcaagcgacattatttatttgacgattctgtcatcgtaaatataaatgccataatcggcggccctggcactcgtcgagatggtgggaactgcttaacaaccgcagatggtgagcttgcagttggatgctcggtcggtgcgacggcgttgacagcacacaaaaactccgtgcggactcaagaaaatactcgtgaatgggcttcaccggcgagcaccacggaccgtggtggtccacggtttggtgccaccaattcattatttgaatgaatgatgcgtgttcgcgtagccatattatacctgcgctaggcttaacttagctattcggcggcatagtgaattcattatttgcagcggtcaatttgaagtgtgaattctcgaagcgatccacacattaccacctccgcaaaacagaccggcattgagacgaaccggcaagttttttggaataaattgacttggggaaacataacgttgcgtatcaccagggcgctggcgaaccagcgcgcacttcatgatcatgcctcgatcgggaaggagcaataatgcctttcctgacagtatttgtcgacaataattggtcactcaaatttatatacttttgcgtggcaaaatagtccgaccaaattctgagctatccacgaaaggacgcgagcagatcaatattgaagtggccgaagatgaacgacgaggatgaactggacgacttggaggcgaaggtgccgtgccttcaaagcaatggatacacctctctgcattgcatactaacgcacttgttgctcggctttgcagctggacgacttgacgcaccagaacgacgtgctgcggcaggagaacgagctgctcgagtcgtatctgcagcgcaacgggcagccaacgaccggcagcgacgatgaggagaagcagaacgaccgggacaagaagacggggctgggttccagacagcgccgcgtgcgcgcgcaggtgatgctcacgatcgagcagaagaacgacatctgcagcacggagctcgaggcggcgcagaaggagctggaggagaccaagcgctcgtccgagcggctcatcgacacgctgcgcgccgtgctggaggagacggacatccgcatcgcggagctcaagaaggacgcgtacgagttcaagcgcgacatcgtcgtgggcgccgagaacttccgcacgggcaagaccatcgccgagaagatgatccgctacatggacgagaagttgcgccagaaggacgccatcgtggagaagctgcggctcaagaacgcgacgctcaagagccaagcgcagaagatcgacgcgcagctccggcacaaggaggaaatgggcgatgcgctgcactacatcgacttccatcagctgcaaatcgagaacaagcagtacgtggccaagatcgaggagcgcaacgaagagctgctgcgacttaagcagaccacggggagcaccgtgcaagtgctcaacaacctgaagaagcggctgcacgagctgctggaggagagtgcgtggctgcaaggagagattcgcacgcgcaccgagctgaatgagaagatcgtgaaggagatcgcgctggtggaggagaagaaccagaaggacatgcgccgcctccagtcgctgcagatccagcagtcggctgagccaagcaaggacatgccgcagattctggactacgtcgggcagaaggcgaagatgtacgagctgcaacaagaagtcaagaactacgagcgcaaggtggagatcgcagagcgagctgtcaagttaagccgcgccaaggaggccaagcgtttgcaggcgcaagggtagcgaatatgtatactacgaaagtacacgactaggacgcatttgtaggcttgatcgggctaaccgtttgaatacagccttgcctattcaaacgacgcgacccaacgaaggctgtttctttacttgaccatggagagagcacgcattcgacgacgtcgccagcagttccaagcgcagcttgaagtccagtctcgagagctgcgcgatgcactggcagctcagctttcggacggggccaagaatgcatccgtccacacgcgactcgtgttgaagttgcagtatcaattaggcgagttgtgtgcggagtacgacgagttcgggcttgcaagcatgtacttccagcaagtgctgaccggcgtcgaagcttctcattcaaacggtgaacaactgaatgaggagactgcagaactcaccacgctgcgaacaaatacgctcaattggcttgctgtgatgaactttcgatctggaaaccaaagcgaagcgatggaattcctgctccaagccaagaaactcactcgaggtgatgcctccccgactgagttagccagtccaccggtggacaagtctttgacagccaactacgccatcttcttgcacgccaaaggcaacaccgcagacgcagagagcgcagcccaattggtggtgaacgagggagcgtccgactccagtgaggaatctgaggatgatactcgagcgcgaagtactgcctccatgtgtacgttttctcatcaattgctgttgcactttacatactgaacgagattgtgtactgcagtgctagcgagtatcttcaaagctcgaggtgactctgaacgagctttgaagaatgccgaacgggcagtcgccctggctgatcgtgtgcaagatcctcgactaatttctcgtgcgcacaacaacctcggtatctactgcctcgagcaaagcgacgtggagcgagcgttcaatctcttcgcaagcgcgtatcgagctgctttggaaacaaaggatttccagcatcaagcgatcgtcaaataccacttaggtatcgctctgtcatatctcggtcgaaatatgaatgggaagcaggagatcggcgaggacgacgaggatgaagaggtcttagcggaaatacgacagaagcaagagcaggaacaaccgactgcaccagaaaacaatgagaagctcgacgttgagctaccggctgaatgcgctaacgctgaagctgaacccgcgtccgatgtaccaacccctgcagtctcagtgtcaccgcctaccaaggggcctaaagatttatttcttgagagtgaaaacctaacaggggctttacctgagccggacaaccctctccgcgtgttagcacagagctgtcgtggcgaggaggaatattacgcgggtgagttccacactgccgaagctgagttttcgatcgccctgggtcaattgaaagaatttacggggatcgacctcgaggagaaccagagttcggatgtagcggtaaatgataatgtgccaccaaccgagaatgaagaagttgtgaaggatgcagacgctgaagaagaggaagaagatattccactacctcctattgaaccggagctggcgaagctgcatggtcttctatttagctacactggatgtacacaactagtggagggtaaattcgcccttgctgagcactcacacaaacgcgacttagcgttggcgctacgtcaagaggatctttatgcccagcaccgagctttgcgcaacttggccattacttataatgccacgcagcgatatgttgaagcaatccctctttggcgtgaagcgcttgagctggcagtcgttctcgacttcaaaggagagcaactcatggcgtattccggtctaggatcagcacttcgagagctgttgattctcgagggtcctagtgcggctgcagtagcgggacttggatccaggcagccactgcaagtgttcttgaagcaacgagctctagcagagcaaacaggtgacctccaccaacagattttggctcaaagacacattgtcagcgtgtatgaaagtcccatctcaaagccccaaagcgacgctgaggctacggaggcactggaacgcagactatcggaatgcgacgtgctggttcggctgtgtgagaagtacgataacttgcagtatcgcgcagacgcgtatcgatctctggccaatgctctgacgtcgcaactcgcgcgactgcgagctcgagcaaatggcgatgggacttccccaccgcagtacggtctggccgatgcaattgccgtgttgtctcaaaagcgcaatagcgtctgcgccagctaccaagaagccaatgttgcactctcaaccgcagctgctctcatgttccaagacgtctatcaagaaggcgtggatgacgaagagaaagtgcccaagccgaagcctgatgagcgtcacgctcgcccacctctaactagactcgaaatcttgcaacgccgataagcaacgctaagataaacgcagtaagaaatctagggatgttgttattcgcatagttcagttagtagctatctggttcagttccttactcctcgcctaaactttcttcgctggcttacgtttgtcgctggaggcgaggactttgaaagtgcagcggagactctcgtccacgaccagcatggcgccagcgttgtcgaactcgttgcagtagttgggcgcggagaaaatggtcacgagtttgcggccggcgaagaactcgtacccgtccgagacgacctggtgcgctcggcagaccaggtccagatcgtgggtcttcaggaactggtccacgacgtcagtgccgaagatgtaggacacgccgcggtcgctctcggtccagccttgactgtcgggatcagggtcagaccacaggagatcgcacagcagaccttcgtccggcacgtccgtcggacgtcgaatgttcttgatctggtcgagcgtgtacagatccggtgacaggcctccatgcgtgcagaagatctaacagaaatacagcgttagagagtttgtcctgccatagcattgtattgggaatctctcacctttccagcaaccacagccgagatcggcatgcagttgaagcagtcgccgaacgtgcgccacaccttgaccgagtatcggcgcttgcattcgtcgtaaaacccgtagatgcggttgatcgaggcgcactcgtggttccccctcaagagatagagctgctccgggtacttgatcttgtacgcgaaaagcagacagattgtctcgatgctctgcatggcgcggtcgacgtagtcccccaggaagagatacctccgttcatccgggaacccgcccatctcaaacagccgcaacaagtcggagtactgcccgtgggtgtcaccgcaaatgttaattggcgaggggacttccacgagcggaggctgctccaggaaaatctgtaagcaacaaggaaacgtggttagacaaagtttacttccgataaagaggcggtggaaatatacgaaccgtgcggattttacgacacagcagcagcacttcgtctgtggtgatgtcggtaacttcagtctgggtgggtttatcctgcacactgagcagcttgcggatgaccccgtcgactatctggatgctcgggtctgccatggtcaggtgttaaatactctatctgccacgtcgtccgtcagatgaacgattccgagtgctgcaacggaacaggccagcactcagtcgggcaagaaggcgagtcagcgaagccgaagaaagtgataccatgcaaccaacgaatgccgaggctattttagcaggaatgtctgttgccatgaatagctgcgagcgatagaacctaggtggacactactactacgtgtatataccaaagttgaaattagtatcagtagtacattacgcagtcagttttttttctccccgtaatttaccaacgagaatcgtagaacgttctccgcgaaagagggaaaaggaggtaattttcgacgatggaaccaataagtaccttctggtgcgaaggaggtctcctcctcacctacaagcaccacatatagcaacaccaacctcacacgcatcaaatgatcatttcaacgacaacacctctcgactgctgagagtgaaaggacgcatccgatgcagctcaagtaggtttcaagtcctctcggtattggaatagggctcttttgtgacaccgcttcaccacgccttcgtttcccgcttaggtacggtaccaaaatctctccctccccttctctctcattcgagaatctgccgcctggtggaaagatggtcaagcttttttgtgctatcgttggcgtggctggaagcgcgttctcggtgcgagtggacgagagtgactcggtggatgacttgaaggacgcgattaaggcgaagaacccggcgacgatcacgggcgacgccaaggacctgcagctcttcctggcgaagaaggacggcgcgtggctgaagtcgaaggatctgctccggatgcggaagggggagatctccgatgaagttgagagtctctacatgaaggaggaattggacgatccgacggacaagatctgcgcaaaatttcccagcacaatccccgacggaacgattcacgtgctggtggtggttccggttggtgcagttggttcagcgagcgagacttccaggatggatcaagtggtccaagaggtgcacgaaattcatgcgcaaactgtgctgaccaagcgcaagacatatgtccactcgaaggtgggttcgaccgagtacaaggaacttctggacgccttcaacattaaggtgcaacctgtgcgtaaagctgctgctaagtggggtgaagtcaaggggttcacatgggacatgaaactcagcgaggagaagcagaaagatgaatatcgcgagtatgttgacagcaacattggcgagcttctccaggaggagaagctttgcgtgttcggtgtggaaaatacgacagatattctccgagttgttgtcaacggctccaacattgagctccggggtcgcaccgatcttctcatactcagtgatatcgtcatggagagcgcggattatgcgctggacttgcctgaagtgaagatgctgattgatgtgaagaaaaaggttgaaagacaatctgtcttccaggcgatgtcagagctaattgctctggctctgcttgccgacgacccagtggttgcactgcttactgacttcaacggcgattggcgattcttctgggtcgccgggaaggaaaacaataccacttgcgtcaacaaagtgaacattacgaatccaggtgaagctttcgagttgatcaggcagctactgaagcctacggatatcatgaccccagtgcttcaagaccctgtgaagcgccagaagttatcccgggtgttgccgtccatcagcgaggccagtgaaagtggcgggattcgtgagagcatcgaacgatactatgacatcgccagttgtttaggccccgacttggacatggcgcgtgctgtggctagacaggtcactcgatctattcccacgttgagttatttcagctaattcttgctttggcatgctgcattaataatttttttattctgatatataaagttagtaatatataaagatgacttactctcatgagaaataccaagctaacaaagagcgcatcaaagcagctcaaaagcgatactacctgaagacgagagaaactcgtatcgctaagcagaaggagtacgatgacaagaatcatgagcaaattcgtacccaaaagcgtaaatcatacgcggcgaagaaacaaagcgaacctaatcaaaccgaaagcgaacctaagagtgaaaccgaacttagctaattaattaattaatttttttgaattttgtatcagggtatgatataaagtcctattctgacataagatccataaattataaagtcaatatattctgatattatatcgtcggatatatatagcaatgttcgcatacgagttagaaggactaaagcgattaaatattcacccaatcaaatgggggagtagctatcgagtcaagatccggggtaaaaccggtagaatgacatatattagcaatctatcgcgccccagcaatccgaatttgattgcgaaacagtacaaagtttccattgaagatcttaaaaagcatatgtcgcctgagtataaggctgatcctaagtatcgcttttataacggtaagcagatggattctcacctatatgaaggaatccaaccagctgagttctacgacaagcttgagaacgtacttaccagtcaaaagaatgccttcaaggttaatatcgctctcggctacgaccttgtgagcttaaccgatgatttgacacagtattggcatccgaatatatccaatacgagtgtatttaacacccctattgctatcaatagcaaggctgacatccgtaagaaagtaatctctgagattcgttcaatggagttggcaaacaagctcaactatccaagctctggatacaagctcaagtctatcactggctttagaatttacatctatcatcgcaaccatgctcttggggatagtgatgcggtcatccctaagattattcgtaaaaaccatcacgttatcaatttccccaagactaataacaaatgtgtcttccactgcattgcttatcacaagcaggagggagccaagaaggatcctcgcagaatccaggctctggtgaaacaagccttcaagcagtactgttcgtacaaggagatcacctacactctgggtctgttccgcaacttcaaacctattgatatgctccagctggatgacgttgaggaatgcttcacacttagtattaatgtctatactacggatattgaatctggaaacgttgaatgccttcgtcgctcagacaaagagtatgaaactatgaatatcctgtcacacgagaatcatgctctatatatcaagaatgttgatatgctccaaagcaagtatcaatgtccgaagtgtgaaatgattttcgtcagctctgacaagcttcgaagccacaagaggaaccaatgcgaacgagtaaatattgaaagcttcccagcttagccaacgatctaccaacctgctcagaacactaccagatcactactgacgaagtactccattaaagaggtggatcactatatcgaccacttcatcgtttatgactttgaagctattctaaagcctaccgctactcaacacggtaaaagcactgtctttactaacgagcacattcctgtgtcagtatcaatagccgatagtttaactgaggaggtatgttgctttgtaaatgatgacccaaaagcattgcttacggatatgttcaaatacatcgccaatgtatcggtaaagatccaacagtacaatgtcaataagtataaggcgcttcttaaaaaaatcatcaatgctcacggtctcacgggtatggagattccagacacccctctcggtaaggcatacaagatgtttgacgtggatagttggattggagaaggaaaatattgaagtttctacgatttccatagcaaaattggattcggtaagcagagatcagattatggtaagatcaagcagcagcttgatcaggtaccagtatttggcttcaattctggtcgatacgatatcaacctgatcaagagcgagttgttcgctgtgattggtaccaacaatatcaaatctgtcatcaagaaccccagctacatgtgcatagcaacttggaacatgaagatacttgatatcagtaactacgttccggcttgcaccagctatggcaagtacttgacgacgcatctcggcggatgcaagtgcgaggacaagattagctgtgtttgtgggcttggtaagggtcttttcccgtacgagtacattaccagtttcaacgttctaaacgagactcaagtcccgcctaagtcagcttttgacagtaagctccgaggaacaagcatcagcggtgatgaatacgaacgagtaaagtgggtttggaagcactacgagatgaaatcaatcaaggatctactcatctggtacaataatctcgatgtagttccattcatcaaggctatccaagctcagcgtgagttgtttaaacgttttgatcttgatatgtttgtcgatggtgtgtctctacctggtctatcggagaaagtcatgtaccagacttgcttcaaaaatcttcaataccccagcaagaagcctgctaaatcgttcaaattcccggtaaagcgtatgagcggatacaagagccaggacgctgatgctaagcgcgagttcaatttgagtctcaatcacctcaataagttgctatatcagcagaagtatctttgcggactgtgctacaaacaattgaccgtcgatactgcttctgccgatagaatcaacaataagcttgggcacattgacggcaatgtcttaattagttgtatcgagtgcaacgttgctcgaaaggatatgtctctcggggggtttcgatacaagaaactgctcgagttcaattcgaacagattggtttattcgattgacaaggaggaatctgagatatacggtaagatgaaggccaacatcgccggtgggccatccattatcttcaatcgctacgccaagcggaacgagacaaagatccgtggtggtaagctctgtaaaaagattatcggttatgatgctaacgctttgtacctatgggcccttggtaatgagatgccgtgtggtcgattaactacagttgaagcttatcctggtatcattgatgacatcaaggcagataagatattcggcttcctcgagtgtgatattcgtaccccagaccacctaaaaggctacttcagtgagatgacccccattttcaagaatgtgctaatcgattgtactgatgagagtgtcattggcaagcatatgtttgattacaaccagtctcgcgaagcaaatcgttctaagcctgctcgcaagttgattggtagctactttggtgaaaagatccttatctatgcaccgctactcaagtggtacctttctcatggtatggagatcaccaatacatacagctttatcaaggccagctcccacaaagcatttgccccgtttatggaagctgtgtcaaatgctcgacgagagggtgatgaggggacctcaggggcgcagtccctgggaatctccgactccaagcaacagcttgacgctgataagtcaaaatctatgattgctgagatgatgaaacttgtaggcaacagcgcattcggtcgatctggcatggatatgagcaagcataaggaggtcaagtatgagtcgaaccagaaggcaattgaggcaaagatcgaacatttcacgttccatggtctggaggaactaaacgatgcttgtgaaatcaccatgaagaagagacgaattaagaacaagaacccgattcatctatcgattgctatctatcagcttgccaagctacgtatgctccagttctactatgactgcattgactacgacttcgaacgaagcgatttccagtatcaggagatggataccgattcagcgtatattgctttcagctgtaagaatcctttcaaggattgcatcaagcctgatctacgcgaacatttcgagcagcacaagtacgattggttccctcgagactataacaacaaagtagctaagtttgatcgacacacaccaggtctattcaaggatgaatggtcaggtgatgccatggtctcactatcgtccaagaactatatttgctatctacccgacgaatcctacaaggtcaaggtttcagcgaagggtgtccagcaggggcgaggtcgcaacgatgatgtattgaacccccaaggatttgagaccgttgttcgggatcgaatcacactccaaggtacgaacaaaggattcacactatcgaaggaatctaagtcaatcatcacatatactcaaacgaaaacagctctcaactactattacgacaagcgccaagttctctcggacggtatttcgactacccctctacaaatttaagtactacaatatatcatgtttgagctactaaaaaaactctattatgacccaaaaacaggattcataggagctcaagcactttatcagaaggctcacgagttagatcctaacataacactaaaatatgtaaaggattggtatgctacccaatcagatattcaacgatttcaggagcagaagaagcgatttgatgggttcaagattgcttcacatagtcccaactcatggcagatagatctcgcgttctgggacaagaaaccaatattgactgctatcaacatcaactctcgactcggttatgcaaaagccttgtcaaacaagactgcatcaactgtgttagcagcgcttaaagcgtttgtccgcctccataaggtggatatcattacaagcgataatggcagcgagttcatgaactcacagactcaagaattcttcaaaagcaaaaagattgagcacttcaacaacgagcctggtgatcatcggacgatgggtaaaatcgagagattcaatcgaactataaagcagagactaaccaaaatgtctccgaagaggctcacacagaaaattatagctgatgttatcgataactacaacagcacatttcatcgctcgattggtatgaccccgaacgaggcaagaggtaaagtaatgatggcggatctgaaccataatcaagctgaagctgataaggtcgaaaacgcgtttgatgttgggtcgaatgtactgtatcgtctcaaaaagaaaacatttgataaggaagctgctcactggagcaagggtatttactcggttatcggcattgatggttatcgggttgagatccgttccagaaatgggcatacgctctacaaagccccgaacgatttaaagattgtgaaagcagatactacagatgctactatcaaccgtggcgatattctcgaagctgagaagatattagcccataaaaaaatgaataatggcaaatataaatacctaatccgatgggtagtaggcagtgagcccgactcatggaagcctcaagataacctacgcttcatcaataaaaataggagaagcaagcttgaagaagattatttatctcacatagccaatatataggctatatatatagacaccatattcaatatggcttgccaagcaacgaccaagtccaacaaaccttgctcgagagatgctctaccttgtggttattgtactcagcactcaaaggactacgagattgcaatgtataagaaagaactcaaaaagatgcatcagcgaatgagattctacagcgataaggtcaatcaaatcaatcatatgctcaacgatatctacaggctcgactatatcaagtatcatcttcaccaactcgaccccaatcgtccatatcgttatgtatgctctgatccgaaatacagggatcaggtcgaagatctatttggtttgcctatagatgaatgtaaaaacgcgtacgtcagattgctccaaaggcgtaattcgatcgttcataaatttactatgaaactttgggagtcgcgggaagatatacctaacattgaatataagccaaaacttcgtaaataatatcgagtttgatatatatactaatcgatatgttcccttcattcacgagtctatccgatcgcgagcagaagcggctcgatctactcgaacgcaccaagcttcggattaaacagaaagatgaagctcgccgtatgtatgctgaagcttcatgggccacaaacgccgataaaaccatctccctcgagaagaaatccgcaccacaggtggagtcgcagtcgcagactgccggcttcgcctcacgcctgagcgaccgctcagcacaagattcttctaatcaagctggagatggtgatttaaaaaaaaactctgaagtagatgctacaatccctgtagttagcgataccgcgacagaagatagaacaaactctcaggaagtccctgaagttaaaactgatggttggtcgaagaccgcccgggagggactacacccgctccctgataaaactgaagaattcattgcaaaaaaatggatcaagaaactctatcagtctaatccaaactggatcgctgttaaatttaatccaatcaaaaccaataaaacccaagatatgaggcgatatattggaaaaatggaaacctgttcagtctcaagacaaataagaggtcagattctaagtacattgactgggtactaaccgcaactgaactgatgaatattagatccgatggagaatcgaacagtattgatgaagtcagcttgatgcgcatggaagataccgatactccgaatcaattatacgatataactggtagtaagaggcatagatttactacttcaaccaaaacggctaacaaaattcatgttcaaccaacatggtttcacgatgcttcttcatcgactacaatagatgaggaacaagctaaatcaaagctcctattcatgctgaaggcttacaagaagaaactgattggctctaacatcgtcataaggcctgttttaaaagatggagaagttctagacaaatacgaactaatcatcgactctaagggggatctcaatgttagaaaccaagaaacgaataggaataagcaatctcgactatctgatatctcttgggtatcaactctgtcattgtttattgagacggttaaatcacgaggattgacttttgaatttgaaccatcaccagacactgttttagatagtgatcctgaccggttcaaatccacgcaaggtatttggtataaggggaagctgtcaggaccagatgtcatggaggacctatctatcccagagactgaggcgaaggcaattatcagcgactactatatcgaagcgggtaaatcagatagcatcttcccaattcatttgcttacgatcgtaagtgggaatccaaataaaaaaatactatttcgccgttattgatggcaacctacgacttagaaaactggactgtaagtcaaatgcacccctatctggtaaagctcataccagctttttcaagcgtatccaatggccagaaacattgaatctattaatggattaccttagagagatggaatcgtttatccactctgatcacgacgttgataatgcaaccaaagagccaataatgaatgctctcaagctgtatatgtacgttttgaaggcacatggggttaagattaaagagccaaccgttggcggtaagctcaagggtaggccttcgcggggctggcatccagcctctcgaaggtgttttacgaaaaacaaatcaaacttacaacttgaatgatattcaaggtaaagcaactccttccgcttacatatataggaagcttggcagtaagtttatcagactaccagatctcgacaagagaactctcacgatcgttcagccaaatcgacgaaaagtaggcccaatgcgtgagatcagtgatcctctacaagccatgatcaaggatcttgtcttcagaaacgatatcagtcaggagaagtatgataagctatctattgatgataagaaattgttcaaggaaatccttgagatgacacatttgcaatacagcttcgatcataatttagaggatcctcttgattccctacgcatggagtacgataagctcaagggcgagctgatgcttggaaatgataatccaacgattctaaaggagttgaaggtggtctgtgtcgacatgtatagcaatcgattgatttcagattctgaattcaaatcaattatcacgagactattataagatgttgattcttgatccgcgactgatttccaagagcgcaggtatctatcagctcaatgccgataggaacctcactgagcttaagcacctgatgaaggatctcattatcatggaagctcctcaccaagatagaccaactgtttgggcgagcgactcaaagccattctccactaagtaagtagctacgcaaaccgaagcagatggaggtcgtatgtgggcatacaaaccaaagaaaaaaatgagcaagcagccaaagacgtttgctctgtaagcctcctgaatatctgagctccaagggagcgatttgaccgaaggccaagagctctcacctcgagaccaaggtctcttgctttcaatcaatagaatatctgagctttttcaaagcgatttgaccgaaggccaagagctctcagctcgagaccaaggtctcttgctttcaagcaatagaataaagtttttttgcccgaagggagccgctacgcgggctcattgatgccccttatcctctagagcgtctaaacgatttaggacagattggaggcatttatggagtaagcaagcgatcttatcgtaatcgagagttaattgatacccagccatgtctcctgcctgctctatctgcaaagaatcattttgaatgaatgagatacactcgactgcatatttggctacatcctgagctatatagccgagttcttgtctctctgaatttggtttatacgcgaagagtttcgggctaacgtttcgaatgaatgcagtggtatcatcgatatcttggatattggtctttaatcgcctatcactggttgtataataggacccactacttacaagaatgctgttagagctcttgattgaaacggcgacgctgctcactggaccaacggtaaatgtcgtactggttttagacaattgaccatagcctaaaccaccgctatcgatagtttggctcacggagccggatacatctaattgcgctgctggggaagttgtaccgataccgacccttccagcgttcgttcctcccagaatagtcattcgtgtgctatcgtttgtccccaatctcaaatcgttattggtcatcgagccaaagaatacagaatttgtagaagtagctgaagttgagttatgacattggatagctgctctaacgcctgagttgccatagaagtcggcaaggagactaaagctgccatcgagccatgtagtgttatcactttgtatcgataaccaactactttgattagccagagtctgattgatagtgcctccgctcactaaatgaacactatcggcatttagagtgcctcccaaccccatatctccagatacaactaaagtgccattggtttgtgtagttgatgaaatagccgcatcaaataagacctttccattaggaatccaaagtgaataagcattggtaattgtcatattagttcctgctgtaggagcattagcaatatatactgttgccgcatttgtagtagttactgtagcattagaagctgcaatagttggttgagcaaatgaagtaatagtagcacttgtcgctgtcccagaagaagctgtgcttgtgtttgtataggtagtagctaatgagttgtattgaatacctgaagtagtccaagatgcagctgatacagctgttcctccaatagtaatatttttagctatacccagaccaccactaagcactaagccaccagtgcttgctgatgtagataatgtgttattagttaaagaaactattccagaagcattaatagtagtaccattaagtgttccaccaataccaataccaccagttactactaatgctcctgttgaagtagaactcgaggcagtattattggtaaaggtaactaacccagatgcaccaatagtagttgcgccagaaatacctcctccaagatctaatgatgtaacagtgcccacagaagtaatattaccttgagctgcagtagtcaatgtaccagtaaggttagtagctgttagatttctaatagtagcaatatccttgttggcatccaaaacaactgccttggaagcagcagcagtaccaggagttacgctatccaatactccaatttcagactccgaaatagtagtggatcccatagttagtgtaccacttgtagtaattgaagtaagagtgcccacagaagtaatattaccttgagctgcagtagtcaatgtacctgtttagtcatcttcatatcattgctcgaaaccctcatcaggatctatatgactatttacgcgataagcttgagggatttatatcattttacgaacctgatcaaccgcctaaggtagatgccatccgacggactcctggcgataagccagagcttgtcatcatcgacgactatagcaacgataaaaaccttcagaagaatgtattcagtcattactttaccagaggtcggcatttcaaattgagtaccatattcctaagccacagctggtttgcaacggacaagatgattagattgaatacggaatacgtcgcgctcctccgagcaaactctcgtcgggatttgaagctacttatcaccgactttaatataccaggtctgactgaggaaggcatccttcattattataaccgggcgatttctcgaggaaaaggccagatgctctttatcgatagtgtcaagggtcaaatacgctataactttgatacaccaattaaaattggtgaaaattattaaattgataatataagcgatgagttcattcgttaagatagaccaaacctgtttggttcaagatgggctcaacagtcgatgggcctatacgttccccggatcagcgtgcaattttcaggatgttgaggcttctatccagtcgatcagtctgtataactcggaattcaatgtcgattcgattcagttcgccaatacatcgtttcagatagaagtacctaccgctgcaacgacaagtgtcattagtgtcaatctcgttgatggatactatctttacacagacaataatagaaatattcaaacggctctcgtcaatgctggggcctatctaatcgactctaatgggaataatgttttctatttacaaatcgaagagaacagtacgtattacgcatgtcagctcgattgctcgccaactccaacgtcgctgcctaccggttatacgagaccaactactggtttatactcgagtggtggtactggattgcctactacgactcgtgttcctcgcttgatcatcaataatgctgcgtttggaaacctgttaggctttacgtcggggacgtatccaacttcgcctacaacgtcagctacgagtctgctaagcaatactattccccagatctcgccaacgtcttcatacgttgttaggtgcgatcttatcaagaatgatttcgttgcatcaggtgatatcatgagtgtatttgataaaggggattcaacgattggtaagcagattcaatacttcccaagtcatgagacttggtgtcgtacccacgatggaccaaggagtactgtaagcatcagcatctggaatcagaatgatcaaagagtccatttccacgatacgagcgttaatattatgctactcctacgcaagcgtcgagcataaaaaaatgaagtttttttcagcctttacattgtgaaagatcccccgtccttgttcttacgcatagcacgaagcttagccatatgagcctttgcttcaggagagccctttgcgaatttggccttacgacgcttgccagctacacctacaccgaaacgggttttgatacctctacgaacactatgaatcatttcgtgatgctctggtcgatcagacttgctgacaagatatttctcaccttcgtcgattagatcagtgatgattcctcttttcttagcatagcgaagagcattgcctgcatgtcgttttacatctgagaaactgatacgtcctccttcttcatcgctctcataaccgtccaatcctactccagtaagcgatttaagaccagctctggctgcaatcccagcttcaggagcaccaaatgcagtagcaacagctggaacagctacgtcagctgccttcgatagcaacccactatccttagcgaacttaaatccagatttaattccatgccaaatttttgaccaaatagatccaccctgagctcgcttgtagccctttttgatttcatgcttagttatgtggagtcgaactccacgtccggccttcttagctttgagagctttctcatgcgattcaggatgtaaatagatcttagctcctgacccttgtagctctgctgctgtaagggatagcttaccagtattggcagcctttcgtaatttatgggcgggaacaccgctcgagatgataagttcgatatacataatttgttgattggggacaacgtttgcgtggtagtatagattaactcagaactaatctgcaacaaaaatatttaaatctttgaatttattgaatagatccatccgattgatctgctttgcatataaccatagcagcgaccaaataccacaataagagccgtgagctgattgagtttgaatctcgttgtatttgctgatgccgtatttcttcggtggcccttctcccattgaatcgaaatattcatggttatatacacctatccaatgacctatgtcttggctcggcttacgtagtagaatcaggaacgatcctttccttggaagaggctttttgatctcgcttgactcacaaatgtggtcaatatgaacattgagcttcttagctaaagctattagatcgtgatctgatgatattggttttacaagattcatttaattatttttcaccaaagctatattggagtgtatataactgaatcaactatgtccgatactcagctcgctgatcaattcctataccaatcttcgcttaagagcgatccggccgttaaggtcagctctcgaaagcgtgtgccgtacgtcatcgatctaaaccagggttcgtatgcgaatggtattattacgattgatgctacagctcagcttaatggggctgagggatttgcctgccttagagatgcctacgttgtcattccgtacaaggtgagtatgaagaatactcatgcttctactgcgcttgctgcggctgccaaccgactgagcgttggtctcaaatgcggtgtatggaatgttatcgatggtatgtcgctggagcttaatggtaagagcttgatttcgatgagtgagtataagctgtttgctaacaaccttcgtgctcaagcagagacctcactcgactatgtaaataagcatggtgctgaggatttcttattccccgatagctctggctcgttgttattctcgtctgctacaagcagcctgtatggtgatggttattcgaatacggcttcggatatcactcctgctttgggtacggcttctacaggtgctggagttcttgcatccaacgaaggcttcgtaaagcgtcttctatccaatccacctacagcaggcagtcagaacactaacggttgggttagtatcgcttctggagctgcgaacactattgctaaccagtttgggcgaggggccttcgtccccggtggaactgctgctgctgctatcgcaggaacgtggaattacatgctcaagatcaagttagttgatctccacccgatcttcaaggagcttgatctcatggctaatcctcagatcaagcttcgtttccgcgtaaatcagggatcggccgtaatcaaccttagcactactaaagctatgtcgctttcatcgactacgcttgtttctggtcaatcatgcccgatcatggtagcctcttcggctgggtctgctcctaatagtggagtatttaatgctacgaccgcaggtcagatctcggtggcatggggtgctattaccaattctcttgagccaaccattgatagcacctatttcccttttactactactcgtctgtacgtaccattccttgatctcgaaaatcctcaagctctgatcagcaagcctaacaagactgtccgatacatggattactatgcgcaatggttctaccaacgcgcaggtactggcgtcagctctactcagctgaacactgcattcgatctacagctgtctgccagtcttaagaatgccaaggtagttgctcttctaccgtttgctgagacttcgtctggaaatttcaatagctctactattcagcagttccagtcgtgtttcgatagtgccccttggactgttcagcctggttcgtcgattcgcaactttaatgttcgtattggttcgcagcaagtatttgatatctcgtatgactacgatttccaggacttcatcaatgagttcgctaagcttggatcgattaatggtgatctaactaaggaactatcgaatggtctgatcgattaccaaacctggcagcaaaccaatcgtgtgcttgtagcagacgtatctcgtctgaccgagaaggatgttctacagagcatccaggttatgggaacgaatgcttcgacacagggttgcaacatgcttgtactggttggctttgaaaatgagatgacgtacaatcgattgactggagaggtattcgaatatacctctaactaagctatcgtttgtatgatccgataactatataatcaccactcttcagcttaattctacgatcattgctttttactatgaggagtgtttttcctatcccacgagcgacttgcttaacttttagatttatctcaacctgggacacaagtaattctaactctcctctatctgttaaactgttcagacttaagccaacgattgattcattattccttagatcataaatggtcatcttgtagcttgtattcgaattaattaattaaaattcaaatatttcctgctggctatgtatatagatacagtcgataataatcatgaatttagttttaaattttggtaagcataaatccaagacgattgaagaagtgtatgcttctgatccaggctactgtcgttggttgtcgaatcagaagattctcattgattccgagcctggcattagtgattttctcaaagctaaattcatcaacgatgatgggtcattcttaatgacttggggcaaattcaatggtcgaacgatcaaacaaatccaagcaatcgattccaactacatcgaatggttgaagaagaatgaattcgttaatcagaagatgtctaagctgaagggtgctcttgatgagctcgcctaagctgatggtatttttttcgaaaaaaaatattctggaattcggattagcttgaacgagcttgtacccaggtcaattcttctacggttttcgatctccatgaatgaccatgcaaagattcaggcattgatgttgtccacgatttatgtctcttcgtttgacaatgatgggcatagttccaccgtttgcctgcgtagccacaaggacacgaaatgtcgtggtgaagtctcgctttaaaaatgttcgtcatcattgcctctgccttttccacgtttgatactactatcgaatgcttcatacaacgaacttttgacggagccttactacaaacatttccgtttttcaatacaaacatacacattatcttagttatgatgatattatatactttgtagtttatttgtcaggattaaacgtcatttaaagatttgcctctgaacagttgagcggttccgaaactatcctcagatcctttgagtgcgtcctttcgtgctaagttatcgagagttgaaatgatcatttgatgcgtgtgaggttggtgttgctatatgtggtgcgtgtaggtgaggaggagacctccttcgcaccagaaggtacttattggttccatcgtcgaaaattacctcctgttccctctttcgcggagaacgttctacgattgttctcgttggtaaattacggggagaaaaaaaactgactgggttttgtgctggatcccactactagtatccaaccttgatatttttgcctccataaattccctgaaagtttcgaatgcgactttgaacaaaaagtagcaccgccaatatatttattcttcgcgagcattagtcgtcgaggtccaagtttgtacaacttacaacagtctacgaactgggtaatgaacgcaatctgcaccagcttcttttcaagaagaacaatgagtcaggccatcggcacgttttggtcatatcttcgcgatctcttcactcaatatctgcctccggaagacccgagctgtctaatttccttttgagaagattgtggtgccgagttgactgggatgataggcaaacacgccggatgggacgccaacgtcccataaaacacctcactctcgtttcggttcaggaagaagcaattccgaggcatatcagacgccgcaatatttacagggacgacccaattcatgaccccctgcaccgaacgagcccctcgtgcctcagcaaactctgagaaaatagccaacttgctagcgtgaggtctgccaaaactccgcgttctctggtcaataaaaataataaggtcgtccgtgtcagcatccctcagagctaagaaaatgtcgattccgctacagcaaaaggctgcaaaacgaatgcgttgtttgattggcagtgcgcttagagaagtcaaaacgtagcggtttcagattgtcgtgtagcattcccttatcgatttccctcgagcatttcccaccaaccgcaagtactcgacggcccaccgcagaactccaccaagagacagcaaatcgcgacaaatttgaggatcttcaggcaactcagcataccctgtattcggctccaccatactgaacatttgatccatgctcaggagagtcacggaaagccgcactgaaaacgacgagtcagccaacgattgccattctgtcgcggcaaacatgggcaacacaatcagctctgccgacgactggctgcacaggaagttgccaacaatttccacaagacttttgccatggtccttctcgattgattgacacttatcaatcccgagaaagaggtagtgtggtgtgtcttggtcgcgagcgttaagcttcagcttaatagcgttcacggctgtcgtaattatcaattgttttccattggccggcatccgcgactggaaccactcgacaaacgaaagcgagcaattgtgatgcagaaaaactcggtacagtagtcgccacgcgagtgaagcctcagtcgtcatcaatttatcagctggattggggccaaactcatcgtagaacgggacaattacactggtaatgcactgctcatccaaccccatgtagtcccgcagtatcatgccgccttcttccagcattcgggttttgcccataccagagatacccgaacaaatggggatttggttgtaaatatgactccgggtgttgtttttggcacttcggaaaatcttcgattccgtttgttgagggagaaggcttctttatcgccttctccctcccaaccaaacggaatcgaagattttcctctttcaacacgccagggtttgttaagaccgtgtccttatcggtcatttcacctaccaagaacgcgaggagctctttagccaaggcaggtcctgccaacctactccaaagggctacgtcaacccgcttcggagccaccaccagcacgtgaacttgcccagattttggttgccgaagtattcagcctcattgatccatagcgaggccttcatctgctcgaatccaattgggtttccttgctgatccagcttcactgctgccaagccacgtccactcaacaacgagtctttccttttcgtaagaaagagccgcagatcgcgcgcaaggcactcgaaatcttcatttttcacgtggatcgcgtccttcaacgctgccaccgtctcactctcgccaatgtcgacacatacgacgttcctgtcggaaagctttgcacaagtcagcctcaccatcttctgtcgaagctgcaaattctggaatgagaggctggtaaggttaccctggttgttaatatctgtctccgccgacacctggctacctgaggtagccaccttcagcgccagtgaacctccactgccaaagctgccagaatttgaacactaaaaactcagccgggtcgagaccacgaaagtgctgatcaatgaagaaccttagtcgtcatgaagttttccgattgagatcggactcccaatgcaacaaaagacccccccccccacacacacacacaccaccaccaccaccaccaccactcttacaataagatagtcttccgattgcacctatgaaatacattgcagactgcggcgttcgttgctcgccgttttccgacacctgctgcagacaaatgtcggagaccccgggacacgcacgtgcacagtagcggaccgcgaggtccaaaggatgtcgcatcggtgccggtgttcgcgcctcgacaatgcatgctatagggcatataactcgcagtgcgctccatcagcccgtactcaccggactgtgtcaagctccggatccaagtgctccattcgagcagtatccgctaggaaagccggtcaccggaccagctccgaagttgaacacgctgcatcactcgatcaatttgatgcgagccttccgccgaccagccctcgctatgatatgaatggcgctcgtgcatgtaacttattcgatgcttggaatgcagcaaattgcagtggcaattgttgccgtagacactgcccaaatgtgcggttgacccgagtgcgtgttgcacgaagctcggcacctgattagtgtaggttccataaaagctgcctaaatatcatacctaccccgcccgctacaccatagtcaatcccagtcaataatagcccgggggccgtcccgctactctagcccgcgggtgagtgacgcgccagacgcgatcttgcctcaaatcgctgcatacaaactccaagataacgctttctctcattccaccattctggaagcaggtcatttctggatccgccggaccaaggactcacttaaccaccctcttccagcctccgcttccgcccccaccccaccgcctccaggatgaagttccacaccaaggaggtgctcaatgacacgtggacgcagttcctggcgctgtgtctgctgctcatgctggccgtcgactcgctcaagtgcgtggcaatctctctctaactctctctaaccgtctctaaccacgagcgtatactttctctatccatgcgtatactaactatacatctttctctatccatcgttgcagccccatcaaggccgtgagcaagttcctgggcgtgccgtcgtactactggggcctgctggccgtgggcatgatgctcgtggtgctgttccacaacctggccgacgtcatctaccgctccacgcgcgtcttcctcaacagcatcctcagcatctcgttcaagagcgtggacctcatcggcctggacaacgtcccgaccgagggccccgtcatcttcacgggcaaccacgccaaccagttcgtggacggcctcgtcgtcatgatgacgagtccgcgcaaggtgggcttcatgatcgccgagaagtcgtggcacctgccggtcgtgggccacctggcccgcatcatgggctgcatccccgtcgtgcggccgcaggactcggtggcctcgggcgtgggccacgtcaagctggccagcgaggatgccgtcacgcccgccagctcggccagcggcggggccagcagcggcaagccccagtggctcgtcaagggcgagggcacgagcttcaccaagcagctgacaccgggcgaccagatccgctaccagggcaagagcgtgcaggactcaggatcgcccgtcaaggtcgtgcaggtgctggacgaagcgcagctgctgctgagtgagccgctgaaggacggagcggggaagctcgtgctggagaacgccccattcggcatcttgaagcgtgtggaccaatccgtgacgtttgccaaggtgtacacgcacttgaagcgcggcaactgcatcggtatcttccccgagggaggatcgcacgaccgcacggacctgctgccgctcaaggccggtgttgccatcatggcgctcggtgtcaaggacaagtacaacatcaacgtgccggtggtgcccgtggggctcaactacttccgtggccaccgcttccgtggacgcgtgacggtggagttcggcacgccgattaccgtggaccaggcgctaatggagaagtacgaggaggacaagcgcgtcgcttgcaacaccttcttgcaccgcgtggaggagagcatgcgctcggtgattgtgactacaccaagctacggcgtcatgcaggaggtgctcactgcgcgtcgtctgttccagcgctcgggtgtgcgtctgtcggcgaaggaaacgcaggacctcaaccgccgcttcgccgagggctacaaggtgttgcaggatgtcccccaggcgcacgaagacctcgctgctctgcagcacaagctggatacgtactacaagacgctgcagaagatgggtctcaaggaccaccaggttccttacatcccttggtggactattcacgacgtgctcggctcggcgctttacggcacgctgattctgcttctggcgtcgatcccgtccttcattctgaacgcgcccgtgggcattttggctcgctacgtggccaacacggcgcagaagaaggcgctcgagggctccaaggtcaaggtgatggcgcgcgacgtcgttctgagcaagaagattcagttttcgatcgtggctgtgccgctgctgtggttcatgtacctcgctgctgctgtggccttcacggactggtactggtcgtcgattgcgctgctcatggtctcgttcccgctgttctccttcttcggcgtgcgctctgttgaggctggaatgatcgagttgaagaccgtgcgcccgctgttctaccgtctcctgcccacgtacaaggcgacgcaggatgagctcccgcgtcagcgtgctgagctgcagaaggaggttcgcgagttcgtcaggaagtacgcgccgttcctgggcaagctggccgagccgaagaagctggactggagcgagtacatgcacgagcgctcgttggtggctgctgaaaaggccgagctgcaggccgagtcggccccgccgccgcctccggcgcacgaagaggaaaacgacgaagagccccgcgagggtgaggccgaggatcagatgggctcccccgtgcccacgatcacaaagttccacgacatcagcatcctcggcaagtccgagaagtcggtagcagacttggcgggccttgaacgctccatgtcgtgcccgcccggataccaggagctggctgaggaggtggccaggcaacgtcagggatccgccttcagctagattgttcaaagagaagggtgcgcttggtagtcgtcgcgccatagtcaagtatcgccgctcttcatcccctttagctttttgtgttgctcaaggtgaagacacgaacggttccaacccataaatttcatgaagcgatacatattcattcacgtcttccctgtctactaactcatgcactgcacgacacctgcaaaactatcaacgcctccagcttacttgtggaagatggatccgcggcgcagcgcggccacagcctcctcgcggtccttgtcactcagcaggttgagcacctccaggatgccggccacagcggccttggggtccttgcgaccgatctccacgacctgcgaggccatctgctcctggcggagctcggccacgcgcgaagcgatccactccttgtcgctcgacagccacacgagcacgtccgagtcgccgtgcgaccagagctcggacaccgacacgttctgctgacgcggcacacggccgccgttcacggcctccgtgaaccagcccttgatcacctgctccgaacccaagaaggtcgtcgcgcgcgggccgccggcgctggcagccaccacctggcggcgtagcgtgaactcggcgagttgacgcttgaggcgccagtagaagaacttgcgcgagttcgaccagggcacaacctggcggatgcagcccacggacttcatgcggccaggcgtgtcgtgcaggtcgccgaactccgtggccacctgcacgtagatcggcagcagcgtttcctcgcgggtcttgatctcggccgcgatcttggcgccctcggtttccttctcctcgggcgacagctcggcaagacgcgcggtgagctgcttgagcttgtcgtcgagacggtgcatggtctgcaggagctgcttcttgcggtacttgatctcaatgagaccggccggctcgagcacaccaccgcggccctgagggtcggcgtacatctccatgatgccctcgttgatggtggggtccaccacggcccacgcgccaccacgcagctcggcgaacggcgggatgtacacgaacacgggctgctcgtagttgacgaggccgtccacgatggcagcgccgaacttgagcacctcgtcgaacatatcgcgctggccgccggagaaaccacgccagttggccaggatgaacagcggcaggtcctcgcccttgaagtccttgatggcagtcgccgtcttgtgggccgagtcggggaaccacacctggccagcctgctgcatcaggttctcctgcgaggcaggcgccgccgggtcggcagggatgaccttctcggacgtgcgcacctccgtgacgaccacaccgcacgggatgccaccaaggcgaccgcggccgacgatcacgctcttggcccagccgtcaagcgtctcgcggaacgagtccttgtccatgaggcccgatacccacttgcccgtggcctcgtcgaccttaccagccagcagcgctcgcgggtcgtactgcgtgctcttgtcggcagggcagaagtccaccgtgcgctcgatctcgtccacgcccgtcaggtcgcggatcggcagcgggccgcggcgaaccgccggcacgaaggccagccactcgaggatcgagtagatgcccgaaaggtggttcttggccgtcaggtgcgtcacaccgttcgtgtgcatgatcttcacgccacccagctggtcgttcgaggtgtacacctccttgcccatgagcttgttcagcgcctggtaaccggtcaggatgatcggcgagtgcgtggcgttctgcaccgtacggtgacccagacgcaccaggtaggcaccgataccgacactgcggccgcaggcgtacgtcagcgtgaacacgtcctggtaggcgcgcgaagtctcaccagcaatggtaccactgccgcgcaggcactcgacaccgaggtcgatctcgcggcccacgatgtcgttcagcacgtagcgctcctcgcccgtgctggtgaccagcagctcggcgttcacagagccctcggccgaggcaaccttgtagtcctcgggggtcaggtacaggtactcgaagcccttggtcgggttggtctcgtccttccagcacaccttgtacagggccttgatggactcggccatgccgatgcgggcaccagcgttggccgagaagaagaagcgcgggatgcccttcgagcgagccagcttcgacgcgaggtcgaacagcgtgtcctctcgggtaccgaaggaaccggccttgaacgtgatgtcgttggcgatgatgatgatctcacgtccatccgggaactccggcgtgtacagcgtcagcagccacgccaccataccgatgtcgttctggccacgcgggcgcgtcgtccccgtcagagacttgcccgtggcgtccaggatcagctcgcgcgtctccatcagcaggttcgggatggtgatcttggcaccgccaccgcgcgtacgctgctgcacgtatttacgccactggcgcagcaggttgtactcgattagctccaggaagtcgtacacgtacaccgtgttcgacatggccttggccatctgacgcttcttgtcgaacgggaacaccaccgggtatggcgtcgtcaccggcatgccgtcaagctcgccgtgggtctcgtcgccgatggaggtgaagataggctcgtcgtggccagcggcctcgacgtacgcctgcacgcggaccacgtagcccgtggggttctcagccacaagacgcacagggatggccggggcctcgctgttgaagcgcgcaatgatcttgagctccaccgtcgacacgcgcagctgctccagacgctcggcgtagcggtaggccagaatgcggatcacaccctcgaggtactgcgggtccacgatagcctggggcaggatgttcaggtacacgtggttgttcttggtcggcagcgacgacttcttgaccagagggttggcaaggttcacctccagggcattcagagcgtcaaccagcgagcgctcggggcccgggtaggcgtcgtactgcgagcgagagccgctgccatcatggtccagctgacgcaccacagcgcgcacgaagatgcgctggaagcggtcggtcacgatgtgcgagtcggactccttcatcttggccaggtacaggtgaacgttcttgttctccgacgtcagcggcgtgacgctgtagttctggaggcgacgcagctccagcttgtaggccagaggcgcctccatgtggcgcaggatcttgtcctcgctgtagttcaggcggccggggaacgtgtagatgttcgggtacagcgccatgtcggcgttgtgcaccgagacgttctcgatgttctgcgggcggaccgagaacgtcacacgacggatgttgtgcgcacgcaggtcctggtccaccgtcttgagataagcctcagcctgctccagaagcacggcctcctccgtgtgctcgtccacaagaatgacgtgcagcacgttcacgagcgggtccttgcgcaccgacagcgtcttcttggccagcgggaacagggtcatgacgtccgtgaacgccttctggaaagtctccaggttggcaagacggatgatggcaccgtgacgctcgaagtccgccgagatcttctggtagctctcgaccggcttggccagcggcttctccacaacctcctcctggtcctcgctgctttcctccgagttgtgctcacccaggtccagcgagctggcagagctgttgcgacgcagcagactcgccaggtcgtcgtaactctcggcaggggcgacgccgaccgcaagcgcgtcgacgacaggcgacttgaactggaacgtcttggcgaagatgtcgttgaagctcatggtctccatcgactcgatcaggtacgagcggtacacgcgcagagcgtacagctccagagcgagctcgcggatcttctcgtcctcgtggtcaaggagcgagatgagcaggtcgaacagcggctgcgactggtccagcaagttgtcgcacgcggcagcaaggtcggtcgacgagccgtcggcgatgtaatccttgagcaccttctcgacctggctgaggcggtcgcggtaggacggcatcttgttgtcgatcaggagctgacgggcctcgagggccaccagcgagtactggttctccttgaacgtcgcgagcttctcgaggagcggcacaaaggcggcagtcttcatcgacttgcgaggagccacggcgttgccgcgcgccatctgggccaggagctgcagcagcagcttgttcttggactccagagccttgtgagagcgagcgatggcaaacaccttattgaggtcggccgagttctgctgacgcagggccatcaccacatcctcgatgttgtgcgagttggcgtacacagtctccaccgtgaagtactcgttgatcagctcagtcagcacagtctcctcgccggagatcaggccgtgcttgtacttggtggcaatgtcacgaagcgtcagcacggaggcctcgaagtccgagcgctgacggtccgtcgcgagcgtcttcttgtactcgtccaggatctcaaccacctcggcgacgttgaactcgtgagcagccgtgggctcctccgacaccgactttttgaaggtctggagcttgtccgtgatcttggcgaacacatcgagcgggatgcggccggccagcgacgacatggcctccttgatctcctccacgggcaggagcggctcgttgagcgcctggaacaggtcgaccagcgccttctgcgtgaggtcctccggggcaaagtaaccctgcagcacgctcttgaggacggccagcgacttgcgcatcttgtggaccgacttggtgctgtttccgctcgcgttctcggccgacgggagcttgcccatgtacacgtccgacttcttgacgcacgacgggtcatcgagctccatggtggcaatgcagtcaccaggggccagaacggcgccctcggacttgagcagacggatgacaccggcctccggggtcagcagcggcatgtacatcttcatgacctcgatctcagcgtacggcatgccgcgacgcaggctggcgccatcgtccacgaggtagcgagcgagcttaccggccgtgttggtcaccaggcgcgtggggtcgtactccttggtgaacacacacgtgtggctgtccaccacaagacgcaggccctgagcctccttggtagcgtacgcgacgtgcgacttgccgttcagcagcacaaggaagccgccgtccgacagcgtgcggatctccacctgcacgtacgagtcgttgcagaagagtgtgaactggatggggccgctgcggcacgccttgatgttgtacttgatgccctcgtagatgagctcgagcgactcctgctgggacaggaactggttgtgggggagctggccgcgctcgatctggctcacgtactcctcctggagcgtgttggacgcctggtacgcgcagcacgtggcgccgacgagcaccaccatgagcgggtcagggcggccctgcagacgcacctcgttgtggtgcgagatacgctcgtccagccacgacgtggagatgcggttgtgtttgaaatcgtcggactccatcatgttgacgatgtactcgacggtggtgtggatgtcaccacggatggacagctccttgagcgcgaggatcatgttcttgcgggccttctcacgcgtggggctccacgagaacaggtgaccaatctgcgagtcagcgaactcgtgtacctggccggacgagtccaccgagaagtagccccacacgtcgggggtgctgcggaagttgagctcctggatggcaccgctcgtgggctggaagccggcgttcgggtcctcagccgtgatacgcgcggcaatgacgtggccatgcgggggcttctgcttctccgtgtcgaagtcgatgggggtcgtctcgaacgcatccttgttgtacagacgacgcacgtcggggatgcagtgcagcgggatgcccatggctacctgcagctgcgcggccggcaggttcacgtgggtgatcatctccgtgacggggtgctccacctgcagacgcgggttgagctcgaggaagaagaaggcgttgcccttgtcctcgggcagctcgctgaagaggtactcgacggtaccggcgttcacgtactcgacctccttggcgaggcgcgtggcggcgcgcatcatctgctcccagacctcctcggtgggggcgagcacggggccctcctcgacgatcttctggtggcggcgctgcacggagcagtcgcggccgctgagcgcgatggcgttgccgtacgtgtcggccagcagctgcacctcgaggtggcgcgacttgggcgcaagcttcatgacgaagatgggggagccggggatctcgccgcgcacggcctcccaggcgctgagcaccttgtcctcctcgtgcaccatgcggatgcccttgccgccgccgccctcgctggccttgatcatgacggggaagccgatgcgcttgcactcctcgaggcagtgctcgccgtcgcgcagcatggcggcgttgtagatctcgtcggggatgccgtcgtgggccttgtagtcgacctccatgccgtcgccgttccaggcgatcgtgggcaccttggcgctctgcgcgatgatggtggagccgatcttgtcgccgagcgcgcgcatgggcttgccgggcgggccgatgaagatgatcttgcgctcggtctgcgcgagcgtgtcgggcagcgtggggttctcgctggcgtggccccagccggcccagacggcgtccacgttgaagcgctcggcgatctcgatgatgagcgccacgttggcgtagttgtggttgttggagccgccgggcacctccacgacgtgctcggccatgcggatgtactcggcgttggccttaaggtcctcgggcgtggccatgaccacgaacgtcacgacgtgctcgtccgcgaacatctcgtagctccagctgcggatgctgcggatggccttgacggccgagatgccgttgttggcgatcagcacggacgtgatggggcgcgagcccttctgcagccgcacgtactcctccatgctgctgtagctcagcgggttgctgtcgctgcgcggcgcggcgtcgccggcagcagcgacctcggcggcggggggcgcttcctgggccaccatgtcttgcgtctcgggcgtcgtctcccctgcggctccagttgtggaatggtcggccatgagggctgcttgctggttgcttcgttcttggcgatatgcccgcctatcaatttgcggtgtgcattccagctcgctcattaagttgcgtcactgcgacaaagttgccataacgttgcggcaagcgatgacgcgtcgatccacgcaacgtaaggggtgcccctacgtcactggcgagcgcccgcgtcaccgggggggtagggtatgacgtcgcttctctcgggttctacggcgcttcgactgacgtcaccgcaatgacgtcagccatttacaaccaatgagcgcgatgaatgaagtttcgaccaatcatttgctggcttatttttagagcatgggtacatatagaacacggctacggaaatggatacatacatacaacccccagaatcggagtgccgctctcggagctcacatgggctgacctccttgctggaagcgctgctggttgttgaagcgctgctggttgtagcgctgctgtcgccattcaagctgttggagttgctggagccactgcgcttcatcagactgaggctgtggctgagtggctctctgacgtctccagataagctggaactgctggaactgtaggaactcttggtattgctgcatttgtgatggcactggctgctgcagttgcagcgatactggcccgggtgcaggttgctggtggtgctgtgtatgctgagtggcgtcggtgaacaaagttgccgtctgttactgagactgcgatgagggcctcttcggctgagatgttggcgccgcgggttcagcaggctcgagctgcgggttcggctccgcttgtttctctcgtgggtttggcttctgcggtcagtgtttccacggacaatatctgcgcgcagctctttaaactcggctctcagcgaatccatgagcgtctcgctcgacgctttgatagtggccttcacttctgccttagcatcgtcaagcatcttctgggtagaggccttgatttcgtcgagaagttcttcgcgcggtgaggttgatcgaggtgtagtctgtgattctgggacagggtacttcatttcgagctctgtgctgtcagcgttgggcactgcctcggaggtcggatcgctttcgatggtcggctcggcgtcgggctgtgaatcatcgatggagagtacctggatgcgcgaagattgagataacgcaagggcgttgacagggctgttctcgtcctccgtatcgtggtacagctctgggtcttgagtcagctcttcctcgtctgagatgtgggtttcctcaccctctgagctctcgtccttctcgagatcgattacctcctgggactctgtgaacgttattgttggcgatttggacgaagggtgctcaacgtactcgttggcgattttctcagccaactcgacctggaacttctcgctggcgatgacgctctcatagttaggccttctctctgtacgccatttgagacggtagtgagcgagagcgtccatgaaagtcgccaccaagttcccgaagacgtgcttccaccacatcgccttgtacctcacgaactcctcaatcatgatcttcttcacaggagcccagtgcatcttgtaatagaacagttctttgaggtcgcgcggtttgtcaccgggaaatctggcaccgatggcaagcttcgcctttaccagcctggtgtagatcgtcgcttccaagtccatggcccctcggtcagttaagaacccacggatcgtcccgaggcagaccattggcacggctgtcaacgaagcgtagccaggatccttggagcgcttgcctttcttccacagagtctcgacccggtatctgccatcctccggtgagctgccgagttttccgattcgagtattgaacgcgaggtcttgcccatcctctggtggtgtgaggacgaccacgtcttgaatcacggcgagtggctcgttgtagcgaatgcagtacaccagtgccgtcgtctccatcttggtaagtttttcctcgtggtggtcggtgaagacgcactcagcgatgaatccggcggttgctcgcatgaatatcacgcgaatgtgcttcggtatcgacagtgcgaggtccgacgccgcgagcagagctagctcaactctccacgcttgatctccttcttcggttagacggtggctcatcttggaggagggaggagacgcggggaggagggatgtgtgcgatgccgtgcaaaacgtgaaatgaagcagcagacccaagctgttgtttgttcactaagtagttttgcatcaggcggatttcatacaaaccttatatggtgagtacattggcgatcttaatgatctacctacctttataggctgcctaacacttcattcgtcattcaagctttcgctgccaggtttcttgagtccaccaccaatgcctcaatggtcgatagaagcgtcaactactcaatcggcacagactgcttctatgaaagtgaacacagatttctgtttcactggaacaacttcgatcgatattacagtatcatggtactgtgcaaggatgatatcaagatgatgaagtgtaccgccaccttcatggggcacgacgcttgcgaggatttggcggcccggagtctggctggtaaggttgctgctgctgctgctgctgcagtgggcaaacctaagttggtcgtgtttgccttgagtagggttggtagttttggttgttcaggaagtccaggaagtcttgaaaggtgagtacaggctgcccggacgggaggagctcttgctctgcgtactgcgccagcggcactggaggccctggctgcgtggaggggcttgcaagcggtactggtcgggtcgggctccaactgcggctgcgtgttgggctgcgatgatggcacctctcgccctcttatctcggtgcgcacgcattcaatcactgcggcatgatgtcttgcgatttcggctttgatctcaatcatgaactcagcgttggccgcctggatctcttcaagtgcttttgcattgagcgacttgatatcctctgcaaacgactgcatcattgtgcccaccgcggcttgaagcttctcgatttcatctttgacctcagccttgaactctgcaaccgatgccttcatctcttcaactgattgcgtgtagacagctttggtcgcgatagctgcttgctcgtaggcggcaagtgcttggtcgacatcagctttgacttgtctggcagtcatggctgcagcacgatcatctactgatgtctcggacgctggttcggggccgctgagctcgtcgacatcgctgttgccgacggctacagcatcgtcagcgtagctcaccagcactcggcgggcgctctctgcggcagacaagctcgattgggttcgctgggccttcgtggtgcggacgccagtcttggttggcatcgggtcttggtgagatgtgagcaccaaagagcggaacgaaaagtgagggctcttagcaagagcctcttgcagcaagactggcgtccaatatgcatcatgggcaaagcagctaataagcagagatcactacagtaatttcattataaggccgcaaaactatcgacatgaagtatgccatcgagcaatctacggtgggctcggtgccacacgaagctaggtgcggcgcttcttcgccggcgccttgcggggcgccttcttggccgcagctgctggagccttgcgctttgcgccgccgcgggctttcttctggaacttgctgacatccaggtcctcctcctcgtgctcgctctcggcatcggacggcggaggcagaccgtcatcctcgtccttgacggcggcctttcctcgccccttcttgattgtcgtggaacccagcacggactccaccaccgcctgcgacttgtgcgacgccttgttgtacctgcagcagggaccacatcagcacacttccagtgagcattttaccgctaccatggttaaatgcatagacgcagcgtacattcgcgtgaaggccgttttcgccttggtgtcgagctctgagtaggagtggcgcttcacgccagggaacttgaagctttccatggactcggttaaatcttcgcgggtgatctcgcactcatcgagcagctcgatcacctcctgaatgttctgttgatagagcaacccattagattcagccgatttgctttgcagcacaaagcgagctgaacgtacatcctcccctgacaacagcttcttaagcagaatctccttcatgtacggcacgtagtcgaggcgaatgactgccagcatcagagcagctctgtgttagaataaagtaccagcagcacgagaaacaaggtagcacgaaccttctcgggagcccgacgcgtgtgaccgcattcggacggatagctcacttagcaaccgcttggacttggaagccgacgagttctttcccaaccacctgtgcacacgcaaaagcatataaagcgttagttggtgggtgcaaccaaacaatcgagcaatgaacttgtgcaacatacttggaaaactcaggatgaccaatgaagccggccgagtacacacaggcaccgacgttcatcgcagcctgttttgtgagcaagtcccaccgctgctccatccgaacatacgtgttcaacaagtcgctctccgaaatgaactcagaggcgtgcatcgccgcctcgaggttctcgtccgacgacgtccggttgttcatgatgctctgaatgtagttttcttggatcatcagaggcatcaagtcgtagtcgacgaaataagcctcgttcctagcctcgaaagagagctcacgctggaaaatctgttgagttgcactgaaggggttcagccgcaaactctcatccttgttgtgctgagaagacgggttcaccatgtctgcataggtgattttggtggtggttagccgccatcgctgcatctgcgtgagcagctgacgaatgtcgttgccgcatcggtcagcggcctcttcgatcgcgttcttctcgatgtgcagtccttccttcaggccgatctccatcagccgcttgccgatttgaatcttcgtggggcgacgcatgcgcaagtcgaacgagtggtttgccagcgaccgcaccttttggctctggcggtcattgcaaatgcaaatgattggagtcttcgactttttgatgagctgaataagctccgccgtaccaccgcggtcaccgccggacataccgtcgacctcgtccatgatgatcacacgacgagcgaggtgcatcttctccttcgacttcccactaggtacgccaaactggagcgcctgtgtgcccagcacgtccttgagcccagtctgcagcattttcttgctgcgggtgtcgcttgcgttcagctcggtgcactcaaagccgcactcgcgcgcaactaggttcgcaatggtggtcttaccgataccaggaggtcccgacagcaacaccgtcttggctccacgattttccgacagttttgtcgagaatgggatcttcttggtgcctttgacgtgcatggcctcccagtccagcagccacgtcttcagtttcctgcccagctcaatgttgccgatcatgtggtccagtgtctgcggcttgtacttgtccgtccacagctcatcattcactgacgtgttgagcttctgcttgcccttggacgatgcggtcttggctcctgcaatttccgccttgatcttcgccttctcgtctgccaggtcctgcgcctgctgcgcggctgcagcctccgtgatcaagttgtagaactcgttctgggtcaggatgcggacgttcttggccaccgcctccttgtacttggatccgtccgtgatcttgccgccctgctccagcgtggcgccgatcaccaagtacttggtcgcgcgcgtgacgctgttggccaccgacccgccgcagcatttgaccaggtgcaccgcgtcgtcccgcgacagattctccagcacgcccgagaacacgaacgtcttgccgtctagacagcccgagcacggcgccggcaccttcttcagcgcgccctcctgcttcacaaagccctccaattcatcgtcagcggacgcagtcgaggccctgccgacctccgtcttgatctcggtcttgacttcggtcttaaccgtcggcttgacctccttcttgaccttcgacttgacctcgggcatctcctcgtcctcgtcactgtcgtccttggccgcgcgtcgcagtctcttgagcttggctggctccttcttgggcttcacctgctcctcgtcctcctccatctcaaggtccgagtcggagtccacgcgctgcgccttcttcttggccggagccttgcgcttgctgctgctggcgacttcttcttcatcctcgtcgctgccgtccagcaccaccacgttctgcttggcggcgcgtcgggctgcaggacgcgacggaggcgtcggctcgggctccgcacgcttggctgctgcagtggacaggaatggcagacgttagtgacgagtcggtcagtcgagggacagttatatatgcggcgtacgcttggccggggtggtcgccttcttgctgccggcgccgttactgctgctcggaggctttttctggaagaaggagcggatgtccatggctgctctggcaagatgtgggtggatcttcctagccttcagccgacgaaggcttcgcgccaaaactggcgacaactacggctggttcttgtagaggaagattcgtcggtgcttcaaaatgtggtgtggtgcacaaagagcgtgggatatcagcgccccttcaacagccaatcacataacgtgtagccatcactttcgtccaatcgtccgtgttaaaagcacccccagagtcagagtcagtcactgtgcgtcgccgcctcgacaccttccttcaggcatcgcagcggcaccatggagctctccccggcggcactcaagtacgcgagtctgtgcgtgttgtgcgtgcagaacagcctgctggccatcctcatgcggctctcgcgggtcggcaccttcccgcgcttcaacccggccacggccgtgttcgtgggggaggcgctcaagctcgccacggccttcgccgtgctcttccacgtgcgtctccactgccttcctgcccataatacactgtgcaatagtgccatgcgcctctgactgtgtcccctcctcattgcaggagttcaactcgctcaaggagccgcagcgccggaagcgcatgggcgagtccttccgcaccatcaccaacgtcaacgagctgctgcgcgtgagcgtgcccgccatgctctacgtggtgcagaacaacctgcagtacgtggccgtgtccaacctggacgcgcccacgttccaggtcatgtaccagctcaagatcctcaccaccgccatcttctccgtcgtgatgctgcgcaagacggtgctgccgacgcaatggggcgccatcgtcacgctcatgatgggcgtcgccctggtgcagttggacgaggactcgtccagcgccgccgctgcgacggctaagacaggccagagcaccaccaagggcctgctggccgtggtcgctgcgtgcgtgtgctcgggctttgccggtgtgtactttgaaaagatcctcaaggggtcgggggcgaagacgactctgtgggaacgcaacgtgcaaatgtgcttcctcgggctggcgctgtctggcggcggactggtgtacaacgacctggagtcgatcgtgagtctcggcttcttctacggctaccgccctgtggtttgggctgcgatctgtatgagcgcgttcggtggcctgctcactgcggttgtggtcaaatacgccgacaacatcttgaaggccttcgccacgtccatcgccgtggtgctgtcggtcatcttgtcggtgtttgtgttcgacaaggtgcccacggggcagttcgtcatcggagccattctggtcaacggctccgtgtacgtgtacggcaaggccccggagtggcgcaaagaccacctcgagcctatcttgcctctggctggcggcaaagacccgaaagacgtcgtctagagcagcgataccgccattgaattgctacctttaccaacaaaaatgtgccctagggagtacgaggtacagcagctaaatactatagatgccatacaatacgagccaactcaacgctgtcgagctcgtccagagcgaggttgtaacgcaccatacctagtgcgtcactgtagtacgactagccagcgctgcgaatttagttcgcctgtccccagagctggtcacgaacacgcacattaacggttttgcgctgcaagcgccacgtacgaagatgaagctgcctctcctcctcttgggcgtcgtgctggtgctggctccgcaacagtgtttctgcgtgggtgcggatggtggagttgggaacgacttccgagaagtggccatcgacagtgctagtgctcgggtcattgacgacggtcaacagcgacacgaaacgctctggagcaaggtattaacgctgcaactgagctgtgttatcgttttctcactctcttctctgctgttcaggctcgatcgggactcgttgaactccagtttggactgtcgagtgaggctcttgtcgtaaggaaacctcagcgtttgagttcgttctgcccataaaaggctcactaacggatgctgttgcttaggatgcaaccgacgatacactggagttcctaccgagggggtggatcgatttcctcactagctcgctggacgagttcctagtgcaatgcgaacaagatccagagttcaaggccggggtgacgcagaacctcagcgcaatgcaagctgtgagtagcagcagctccgttcgaattacacttcttaccttgcacactctaacttgtacctgttcagttcgtagcgttcgtctcgatcggatacgccgccatcgcgatgtggctaggctcgatgaagctcacgcgctggcagaggcgaagcgtcctggtcacgtacaccgcagcaggaactgttgaggcaacttttctcctgcaagcctttggccttgtgtccatccacgttgcgtaccatttgacgctggcgttgacggctatcttctttgttgccttcaacgtcaccaacgcgctgctagtactggaatccgaggaacccgatgcggcagctgagtctgcagagtcagtcccgcggatcatcgaggccaccccaacacgtattgtaacatctcacctagcaccttgttgctaacatgtacatgtagcaactttttttcattgttctaacgcggagttaacatcaatttctcaatgtggggttagtttttgttggtacatgtagcgccgatggggtgcaaacacgaatggtttactctgtcggtgctctcactatatgcaccgctggtggatcctcaaccttccacctcaaaactactgacaagcacacttcgaaacctctctttgacttggcgtcgccggatgcttgagcttgagcttgtaccaagatacttttcaactccttgacgcatttgcgcatcgtaatgtcttgacatggattccagccaatcgtcatatcctccaccaaggcctcaacggcttcctttagtttaaaggcctccctgggggtaatactccttccccgccactttttcaattctccaagaacctgcgtggcatctttaccaagcttgatcaactttttgtggttctttgaattcgacggatctaaaatcgcctccgacatgttctccagaagtctgaaacaacagattattgttaggtgacaacaacaacaacaaaataactaacacaacaacgcacgtacccaataatccgatcctttgtcgatcgatctggtatccgctcttccgcaaacgctcgcattgcattcacgatcatacgatacgctggcaattggcgagcgttgccaagatcgtagcttagccaccgaatcagtctgccgatagccttgatcatccgagttgaaaaggcgttatcaacgtcgcgaccagtttcctttttgaaccccagaagcacatgaagcagccgcttggtttgcttttcaggggggagagtatcaggaccacccatcatcgacgaaaacacccccttcttcttggcatattcaatcgccgcgatagctttctccttctccttcgcaggtaacaccaggccttcagcatttttgatcttcaaagacagggcctctactagcctaggaagtaacaagacacgccccgaattaatgcacgctagtaaaacaacgttttgcttggtgtaaacccacctcttttgcccacgctttcgtcttgaacaccgaaactgattataatacgattgcaccacagcaacgtactcgtgatacagttcagcatgctgggcctcatattcgctgccgtgggtccaccaaccaaccagaaccttcatagagctcgtcactccagatgaatacaaaccattgacgtcctcttcaaccgactctttcaaagcagccagcaaatctggcattataaacgaccgatccacccgagacaacttcttcacctcatccacgataacctttacgtaccacaccgttctgctcaaccgtttaactgcgacttttgtgtcggtatcagcttgcttctttgcaggacttagctcgggctccacttcagacgacggatcgtcactcttggtcattagcgccctccaagctgcttcactgccctccacgtcgtctgcatcgtcgtcactattgtcttctccattgttgtcactctccgactcgaatccagacgatactgctactttccgcttcattataccaagagaatcacctcccaatttgcttgacggcccttgcgcgctaattttcgtttcttcctcttcctctgagctctcggaggctgagtctgagtcaacgttagttcccaccgtcttcatcctcttgactgcactattgcaacgcgttctcagtctagtcttctcatctgcaccactctttcgcgccggattgagggcaattggcaccgtcgctgctttctcctccacccgcttccgcttcctctcctgccgcgatacctccatcccagctgcaagtttctccacttcatgttgcaaatgttgctgcaacttcatcgtgttgtctgccgacgctatcaaactgtcactgcggtcgccggtcgacgagtcgtggctctgctgcagcttcgacactgcaccgtggacctcctccagcttcgcgaaagctgccaacacgtcgctcaaagtctgcgcaacggatgcaaactcctcgtacagtatgtcgttgtagctcttgtgcagctgcggcgtcgacacgtgcgccaggacgcgttcgtacagctcctccatcgcagggattggtcaccacttcggtggagtgaactgctaggatttgggtacagtacctaaaaagtggtgcccatttatgattgaccaaactggattcgatggatggctacaccgtcaacaattatcttggccgcggagaggaaggtccaagtgtgtgaccttcgagtgcgcgttgctcggagcacaccgcaacaccttcaccgtgaagatcaagaagaataaaagagggagtcgactgttggaggtgatccagaatcaattgcttcagttccctccaaagtacctgaaagtgtggttgccacaaggaccgacggtgcggaagggaaactggtatggctgccgtccgacgcagaaactcaacctgggggagatccacccacacattgaggccttgatctctgaagcagagttggataccacacgggccatcgaaacattgctcaacgagaagaaactaccagaccccgaagacggccagatgcacgtgctggtgcacgtccctggccctcgtcgcgacagctcgaaagagtggcgtgacaagttccttgccagacaattcgcgcaccaccaattgccgtctatcgagtcgctcggtgactttgttgctcaagctctgcccgagaagatccgggtctgttcacagtatctttggagttggtgtcagcttttcagcccgcaacttcaggagaaactttttgtagtcgacaacgcggctccatgcgaggcgtttacactcaacgtgctaagtcgtctggtcaaattgccccaatgcggcgatacagcgtgcgcttttcattcgttttgggactcaatgtttcacgacgtgctggatttcgtgcttccacaagcaagcgcaatccgcgactccggcaacgaatcacctgactttttgttaatcttcaacgacgtttatgtgtttcgtggtgaagagcaagcgtttggtgttgacctcggcttgccgggtaatgaacttacggaaaagctggtgtggaactatggcaacattccgtattggcttggatacgctgcttcgggctacagagtaaacgtgttcgctctacgagctggtggacgtgggtcctcggaggtgaccaagcatcggatcgagtagttcaatttggagagcgtggaagagcgttttcgaatggtactcgcccttttgaacttgtcgctacttttccccggtatcgcggaagctccagaccaggatgacgacgtcaagacaattcaccgcccaagtggtggtgttgtgcgactttacccagcattcgttacaaaatattatcctgttggcgccatcctgtatcatctagcacgcgtgtacggcgctctgctggaaggtgacgtgcccaatgtcgatcatcttacgaagctggatttcaaactgaatgttgcaaccttcgagccttgtggagagatcgccgcatcacctcctcgtgatttgcccacgctgttcgcggttttgaaggatgttcttcaagcgcttgtggctctgcatcgtgtggggtggatccatcgcgatattcgctggccgaacgtagcgcgatcgtgatgcttggtttttgattgatctcgtcgattcagcccccagcccccacgcgtcttcgagccgcgatcacctacgcgtagaagaacactcccctgaaatgtttgttgatggtatgcttcacacgacggctgtcgatatctgggcagtgggctatttgatcgattgtagtgacattggatgggatactgactccaaaagatctgcgttccgtgagtcgttgatgcaccaagacccggaagcgcgacccagcgcagagcaaccattgcgtgagctgacggagtttcaacaagaagcgttacctgcggaagccgaccaagaccaatcttggttgggcaagcgaaagcactcataatgatgatagtcgcagcccaaacggcaactgactcatttttttttcaggttggactttgttatctaaacgcgctagtagctgcaaaaaggtgcttaagtgtacccgggtggacttcgcctctaaatgtactcgaagtagaatgctaggtttacttcgtactacgtacagttttcttctgcttacagttcatcaatcccccagcttgcaatattgttcaagcacgcatcgaaacttctagctgacttggtgtcgctgagtgcttgagcctctaccataacactcttcagttccttgacgcacctacgcataacaacgctttggcatggattccatcccaccgtcgtatccttcactaggatgaaaagggtctccttcagcgtatgagcttctttggtagacataggtgtacgtttctgctgccatctcttcacttctccgaaaaatttatctgcacgacggcggatattcgccaactgatcaaggttcttggcgtttgacgggtctgaaattagttccgacatgttatccaaaactctattcacaccagttgcaaacaaaaaaattaggtggttaatggcaaggtccaagcagtctcgaaataatacaaccgccaccgcacgtacccaacaatgtgatctctcgcggatagttttagtatccgcttcgaaaactcttgcattgcgttcacgatcaaacgatacatagctaggtgcgtaggcttacgacggccttcagctatccatcgagacattctggtgatagccttgacaattcgatctccacaggtatcctcaacattcccagttgtttcctttttgaatgcaacaagcagcaaaagcagccgtctgatttggtcgtcatggggtagaatatcaggcccacctgccatcgacgaaatggccccgttctgctttgcacgtgtgactgctgcgtcaacttttgccttggtactgctgggcatttgtggaccaccgagactctcaattgtagaagatatagcctccttcaacaacatcgttaacctgcacacaaggaatttaaaatacacaggttaatgcccagtatcagtaggtatgacacaatgctacagtaaaccaacctcttgagcttggacttgcaagctgagcccgatagccgatccgcgtacgactccaccacagcggcatactcgcggtacaatccagcatactgagcttggtattcgccctggcgaacccaccaaccaactagaatttccaaagagcaagccacatgagcctgctgcttagcatccacgtcctcctccaccgattctttcaacgcggtcaccacatctggaataatgaacgacatattgatcggacggatgtctttgttcaccagttcgacgatggtcttcaagtacgttgccgacttcctcggcaccgctgcgtccgtatttgattccgttggcttggtagtagtctttgccgaagtgggtgcagcacttgtgttggatgatgaagcattcagattacccttcgtcgtcaaggccctccacgctgcttcactgccttccacgtcatcactgtccgactcggacgatgaactcgaatcatcatcgctgttagattcggacgatgaacttgactcagatcctgacgctgctgctacttctccctgggagcccgatccaacatcagccttggatcgttttgcattgctggatgcaccattgaaacctgctcttccgttgtcctctccaccactattgggcaccggaatggcgacacttggcaccgttgcctcgtcctcctcctccaccacccgcttccgcttcctctccaccggcaccacttccatcccaactgcgagtttctccactcgacgcagcacctgttgctgcaactccatcgtactgtctgccgacgccatcaaactgtcactgcggccgccggtcgacgagtcgtggctctgctgcagcttcgagacggcatcgtgcacctcctccagcttcgcgaaggctgccgtcacgtcgcccaatgtctgtgcaacggacgcaaactcctcgtgcagcacggcgttgtagttctcgtgcagctgcggcttcggcacgagcgccaggacgcgctcgtacagcgcctccatcacagcagcagattggtggagtgagtgaaatgctagaatttgggtcgatagaatttgggtccatgaaaattgatgcccattatgattgacccataagtatgtgtgaagcttcgctaccttttcactgtctaggagcctgctcaagttttccaagtaagagtagcattgctgtacgacaagctctacagaagaatcccgacagatacgcgcgtaaagcaatattctctaatcgcttcgtcgaaataggagtggtcacactaccttcaaaagagcgtcattgagaaacaaatatgaatgacttaaccgcgctggaagcgcttgcaagcgatggcattatttaagtaagcgtgatcgagaccacgcctcccagattgaaaacttcacctgcaactacatttcgtttggtgtaggctgcgattgacgaatctcatgctctaacaggacgattttcgacaactttgctgctcttcttcgtagcttccacccgccctcaatcgttgctaggagagtttgatattgctgtcgtcgcagcaacaggcagtcattattgcagatcaccgaggctacagcaaagcctctggggtgatggcaccttgctggcaagctgcaatagctgcagcaacaggaaagcctcctagctagcatactgtatccaacagcagcagcgcttcactcgtcatccatcgagaaggacaacaacttcttgttactaagcgtcggtcgatctgtgcgtttgcgcttcttcttcttggttgcgtccgtcgccttgcccatctgcaccaccgtctgccccgaagtcttggtcttcttcttgtctgtgttctcctcttcatcttctccatcttcttctttttctcttttcttcttcttctctttcttatcttcccttttagccagatactcgtcgatcgccgcctgctgcacctcgtccagcccctcgtcctcctcgtcgttgggcagcgtcgcgaactttgcctggatggccggcggctggtggtacttctgcaggaacttggggatcacgcgcgtgaactgcggccctttgcccttgccgcgtgccttgcccttgccgcccccgccgccgccggcgttcaggtccctcaagctgccgtcctcgcgccagtcgtcatccatgatggcaatttgcgccaataatgcaatattgggtcaatatgcaacagcaccctaaagtggcaattgaagaaaccagttacataacgttcgtattgcggttgcgcgtttggggggacggatatagcaattattcattttgttgctagccgcacatttccccgacaccaagaagtgcacgacgatggtgctcaagggctacctgtggagccagcgatggaacatcctgctcacgacgcaagccatcttcacctgcggcatcgtggtcaaccgctacctcgagaaccaggccaagacggccgctacaacggaccagcagcaaccgcagccgccacaaagacgaccgctcccagaacgctcggacaagtgaaaatagcgatcaaagccaatgctatcgctccaccaccacatcaatagacttcccttcacctccaactatgacttccatgcacttgctgcttcgccagcgcgctgcaaggtgtccgagcgcaatgaaaagatgcatcaacatcaatattttgaccacattattacgaatcaattatcaataatattgattgttttctcatgccgggtcccgtcgaggagctggtcaagcggcagcttcgactcgagcaggggacctggtacggctccacacccaccctctacaacgctctacagctccaccactaactcaattcattacccaattgttgcagggaggcggagcagctcgctgtgggttgctcggagcctccagcgctgcagttctggagcgtcggcaagctgctgcgcgtgttgcaggcctccagatcgcctgaaaactctctcgagtcgctggcacaatgcggaattgaacggcatttggtcggcagtgtggacccgagacgagcgacgtcccaaccgacagcagagaactcgcaggcagctccgacagcggacgccgtgacgtacacgtcgagttccgtgtggctcacgggcttcctgcacttcggggaggacgtggagagctgtgacacgttgcatctgtgtgataacaatgcgaagcttccgagtttcctgctggatccgagtccgcaactggtggatcagttggtgctggtcaagcgctgggtgttggtggacaaggcgttcggccgcgtacgaactgctgggtccatgttcctcgaggtgcacgacgagaaattggtgccgttgatgccagttgcaggtgagtttagtgattggacacgggaaagagtgaagggggtgctggaacgtagtttccagcagtcgaaagatccgccgatgtatacgggaacggaaccgtgggctgccgttgcagcgcgttcaagtgacgatggcgacggtttggtagcaacatcatctgatggaattgagccgacaagaaagggcaagaagcggaagcgtgttcattgcgttttcggtcgtgtgacgagtgtgagtccaatttcgaggcaaaaagatcgcgacagcagtcacttcttcgtggaaatcgagcatccgcagagctgcaatgactcgacgatgcaaagcgtagctaccgttatgttcactggagttcacaacatgcgatggcacttatttctctatcctgggaaaattgtgctgctgaccgatctggtgaaggtcctttcgcgtgagtgtgagatgtttctgcttcaagcgactatcggccatcgatccaaagaccctgccgaagcttcaagggactctctgcaaacaacagtactcgtttggcacgagccacccccacctccaagacatttagcgcagtggattgacgactcttttcgtgggtattccaagaacttcgcgtctcgctgctgtggaaaacttttggactacgagggaaaagtatctcgactcctgtgggatgaatgcattgagatcattgggagcgatgggactcaagttattgtttgcctgtttcacttcccgtatacacacgagttggttcgtatccgcaaagacgccaccattcaagtatgtggcgctcacgtactccgctggccgacgcctgtcggtggaaaattagtggttggtttgtgtgctaggagtcacctcaatgtcactgcattcagtgatccgagtagctcctgtattgccatgggaacccgttctcgtcgaaatagagctcacaaaaagtggtcaagcttgggcgatttccatcgtcaatcgatggtgctgtcgatgtggctgctggaggttctggaattgttggatacgaagttcgtctttggagaaaacgagcaaatgctgttgttcagttcctcttcgctatcattcccgcggattcggcgacgccaagctgtagcacatgtggccaagaagctgcacttggatctgggcggtgggcatgatcaaacagcaacaacacttggcgctctcttcttgaagtgtcactccaataatgctgggagttgcccatcgatccagctttctcctgaaaaactattgacgtgtaatcgggtagtgacaattcgagagctcaaagactttggggagagcaaggcgaaggaaatgctcatgacgggggatagtgatgatagtcctctatccatacagatttcagctgaaagtctggactggtgtgttcttcttggatgcgttcgaggaaacgtcgacagtggagatttggaaatctatgatcgcactgggtcgatttcgttgcagatgactggtgacgctgtatctacagattttgatggggaacgcggcgtttatctactgcggagttttcatcttactattgaggactacaatcgaagccaagatcccagtccggaggaaaagataccgctggtatgttgtgtgagcagcccggcagccactttagcgtacctccccatgcttggtgatgatggaatcagttattcgccagaggacaaaactcaaaccgaagccggggaattgctgattatggtgacccacgttgacgctttgccgcgttctgatattcggctgactggattgttgcctgagtatcgagttgtgcatagcatcgtttgtcctgttgcccaggagctccaaagtgatgtgttcatgaagtccgctttcgttgctgatatcttgataagcactcgctgtaccaactggtatatccaaaaaggcggctactaccggatcaaagcaatcgaagacaccacaagtactgaaacccgatccatatctcattacagtgtggaagatcaagcaattagggcctcgatagactattttgaagcaaaatgtgtcgctggaggaaaacgggtggtgtgcttcgactctctgcggcattataaccgcgctgatagtggagatccaagcgaagagcgcccatttcgagtgtatcgtgtggagcaaggacatgactccgttgttccagtcttcctagaatgtgacaaccccacgcaacaaacacggtgtgaaaagcatgatgagtgccagaagagtgagcaaaaccgaagtggaatgctggttcctacaaatgacaattctctatcgggcaaggtatctgcggttttcaccaaggggcaactgctcgtgaaacaaacggccattagcgtatcgataccggaactcgtggctgtgagcgtgctcaggtatttctttcagcagttggaagtggtatttgaagtgcacgacttgctccaccacccactttcgattcgatctcaagaatcagtcgaaggcaacaaagagcagccggttgtaatgacagtggatccggatctgcacaaagctcatctgatctcgctcgttggcatgatcacaaagaagaaatattactggcagtcgacatcaccccagcaaccctccactgcaactattggcgtaaagcgagctcgatcagggaatagcgaacccggtgttgcctatacttccaatcgtcggctgctgtgcatctttcaagtccgcgacctccagcatctggatactgtggagattcgcgtggatgcgtcacgctttggtcttctgggcacgctgcgattgaacagtatcgtggagttttcacggctgcagggtttcatcgctcgatccagctacaaggtgtacttgaagtggagtcacctgactgctgctcgaccggtttcgcaagaaatccgtctaccgattccatcagaggctgagctgtacagctccatgtccacgtccttcctcaacgacatgtaccattattctcaggttgaccgaagactgcatcggtacgtggtcggagtcatgcacatcagctacgtgttgatgaagcgcaagtgtgaatcttgtcaccaggcgttgcagctcgtcaagcggcgtggctgctggaagcacgcagatccactacccggagctgcattctaccgcgaatgcaagtggaagcaccagcactgggcgatatctgaacccgtcttcaagacccgcacgttcttgggcgtcaccgtgcgctgcgtcatcgacgacggatccgcgcaggccgagttgttcctggagaacgccgtcgcgtgggagttgctgacttgtcctgacggccagcgccaacgctttgaggacattctgagcaactacgtggacgagctgagctacttttcgggccgcacagcgagcggctcgttcgcgaccagcagagccgagcgggagcaggagtactaccagaacgagctgcgggccttcgtggtggacgccctaccgtccttgagatccgtggtggtgttcgcccagcggttctacaaggccaagcagcagcaggagggcacgtccgtgctcaccttcggcaaggacatccacctcacgaccaagacggcgccccagcccaagctcgaggccaagcgcgtggaccgcctccatgtgcgcagcgagctgcagcgacgtctcgcgcagctgcgagcgttatcagccgactagcaagacaagacaccggtcgacgacttgagtcccactgtgcgacgacccgatggaccaaaatcatctgagaacttatttcgcgtcgcccgctcgtccaagtgcaaatccttaccgcacttcaaaaaaccagcttcgcttcaacttacaacaaatctatctttcaccaagcacctaaaaggcccgcatttgcagcaacttgttgcagcggcaataactttacggcaattttctctaaccatataaaaagaaagaaaaacatatcgccacaaacccgtcagttagcgagttctgcacgtcaactcgacgcaacgggctcagctcaactgagtccacacccccagcttcccgcaactgtcctcctccacacaatcgcctcgtgtgtctatcactggtgtctttcctttgaagcaactcaactggatcctgttccgcgcgctgtgattggccaatttccgtgcagaagcccgaaaggtcaaagcgcacccacgccagatcggaaagggccactcaaccaactcaaccaaccaaggtttagagaggtttagagagagaccggtagacgtacgtcagacggacagatgcagggccccacgcccgccaccgagcccgcggccgagcccccgcagcagcagaagaagcctggctccgcgcgcgcgcgcaaggccacgacgccgcgctcgcgggccaagaagccggcggacgacaagaaggcggccacgcccaggcgtcgcgccagtccgaggaaccgcaaggcggcgcaggacgcggagcagaagaagaaggacaaggacaaggacaaggacgagaaggagaaggagaaggaggcgacagaggcagctccaacggttgctgttgcttcttctccttctcttccgactgttacggaggagaatgaaggagaaggagaagaaggtgtgaagcaggagacgaaggtggagaagacggagatgggcaaccaacaggaggctgctactgtggcaggtgaagagctgccgccagctcaagacacgcagctgaggagaacgtacctccagagaatgtacggtgctgtaggattttcttttcttttaagatggctacagttgctgactatttatttatttatttattttatcatttaggtatcgacagttgcagagtacgcacccgaaccaggacgacgcgatgatccggcagatcgccacgaacgtggagatggaggcgtgtcagaagtcggcgacgcgggtaagtcttttagttatttcctgcgttttgacgacaagtttttttttcttttgtggaaatacttgaaagactcacgctccctatgttgttgtcgtggctggatgactatagagtcaatacgtcgctgcaatggaccacgagatccacaagctcatgcagtttgagatggaacaggccaacgcgccggtctacacgaacgacgcggctcagagctaccagagcgagcagtctgctactgtccaaggccagcagccggccgtgtcatgcgagatgcaaagtggatactcgcagaaccagatctcgcagtctcacagttatgagtacgcgcaagcgctggcgaaggcgcaggagcaggagcaggccaacaacagcaccaggtcgtcgacattctccacgccgcggcaatcgatgaatggtgatatgtcgtttcaatctctgatggataaccagactcaaggtggatatggacgcgacggtatgcagcagcagcagcagaacacgccgacgcgactcatgagcatgcagaatctgcagcagatggggaaccagtactactcgacctcttccatgacgaccccaaccagtcagagctactcggttcagagcaacgtcagcgagatggctggacaaagtgtccctcggaacatgatggaggcgcaccagcagcagcttggcaactacccaatgcagcaacagcagcaacagatgcacaaccccggatcggtgcgccccccgtcgagagtgacgacgttccaggagtttacggcccaaatccagcatttggacaagtcggtgctaattgagctgctgtggaatcaacggagtgcgttggctcggtggcagaatcatgcgaagcagctcgaactacaagtttcagctcatcaaacggcagctagcaacatgggaagctctgggttccagtctccctacaactcccctatggtcggtggagcggcttttgttagtccaaatatcgccgcagaagccgagatgcagcgcgctcgagaacgtaacagttctcgcatgccgcaactgccgcgccaccagcagcaacaaatgccgcagtacgcgtcatattcacagcagtcgactccaagcagcgctacctactcgcaagctgatggatcctggggagacaataatccaccactgtactggcaacgaatccgacaattgaagtcggagtacgaagagcaattgcggactgcacagagagccttggctcaaaatactgtacctcccaactcgatgtacagcgcgaaggcccagtcaatgatgcagaatatcaccatggtgctgaacatcctgaacgagccgccgactaatgtccagccacggaaacttgaggtgcttagttcaattgagcgcttcatgcatcagagtgtggctcctattgtgcggaaagttctgtcaagcgcggctacggtatccccagccgcagtaacggcggggtcgtccccatcaatgacaacaagtgttgcaacgtattctcctagtgcgccactctctcaaggcagcgttgtgggggtgtctagcagcttcagacaaggctcaggcaaccagtatattggagctcggtgggcatcttcgaactcgagcttcagcaacatggacacttcacggcagcattcacgtggcatatttgcagatttggatgccggtgacgctaacggccagaatcgagtgatggatggattgacagcagtcgggaacagtccgtgcaacgcgacgtacgatccttcgggttatgcgccagtgagagcggaaaatgatagccagcccgacagctcgatgagtcagaacatggtgtatgaagctccgtcgatgagcttgaaagagtcgagcaccttatctctgcccgcgttagagtctcgcccgtcaacaattcccgacagtcacctttcccctggtgatccaggcaacacgcgagatagcaacagcagcaaggtgatnnnnnnnnnnnnnnnnnnnnnnnnnnnnnnnnnnnnnnnnnnnnnnnnnnnnnnnnnnnnnnnnnnnnnnnnnnnnnnnnnnnnnnnnnnnnnnnnnnnntgtacctcccaactcgatgtacagcgcgaaggcccagtcaatgatgcagaatatcaccatggtgctgaacatcctgaacgagccgccgactaatgtccagccacggaaacttgaggtgcttagttcaattgagcgcttcatgcatcagagtgtggctcctattgtgcggaaagttctgtcaagcgcggctacggtatccccagccgcagtaacggcggggtcgtccccatcaatgacaacaagtgttgcaacgtattctcctagtgcgccactctctcaaggcagcgttgtgggggtgtctagcagcttcagacaaggctcaggcaaccagtatattggagctcggtgggcatcttcgaactcgagcttcagcgacatggacacttcacggcagcattcacgtggcatatttgcagatttggatgccggtgacgctaacggccagaatcgagtgatggatggattgacagcagtcgggaacagtccgtgcaacgcgacgtacgatccttcgggttatgcgccagtgagagcggaaaatgatagccagcccgacagctcgatgagtcagaacatggtgtatgaagctccgtcgatgagcttgaaagagtcgagcaccttatctctgcccgcgttagagtctcgcccgtcaacaattcccgacagtcacctttcccctggtgatccaggcaacacgcgagatagcaacagcagcaaggtgatggattcggccagcgtcgacgacgatttctcggactttcccgtgctggagtttgaagaccccgtggctgatggcaatagtttcgtgaaagaaaacaacccgtccaatgcctcgagaaagcgcggaatcgaagacgtgtgattcgatcgcacccccgtcaagcaccgcgtgtgtgtggcctcgctggactttcagtgctaatgccgacgacgagctactgggccatgataccgcggtacattttgctatcctatgagaatcaagacaccaactgaaggcgtgcgtgcagttgctgtccaacgtcaaagagtcctgctcgctatgaatgagcgaacgaatcagccaaagtgttgtgtaagtgttttcgtattttgcattaacttttttcttaaatatctcgcatgcgttcctcctgcttccgtgttgtgatagatcgggtgaggtgtgccatcacgacaccgaaagccgaagaatcgcccgatgttcatattcataccccctaacgagccaggcccagagcgagattcacatgatgcgcttggctgagaataaacctcgcacgctcgccgatagcggcagtgcggccgccagcgaagaccgtgctgggcaggtcgttccacgagcggtagttgatctccacttccatgccaggtttcttctcagccgcagcgtccagctccgtcgcgaggaagtaccgggtcgccgaagccacgcagttcttagcgagctcctcgttgctggaagctttgggggcgggagctcgagcggaatgtctgcgctctccacgcctgggctgcggcagcggtggggtgttgatagtatatccaataaagtagtagccgacgacctcgtcctccttggcttgggctgcctgaggtcggacgatctcgggaagagggtggagggtggccaccgacggtgtgtgctgcaaggtctccactagctttcgggtgcggctggccacgaagctcgaccactcggccagcgcttcctcgttcggtgcacgcagctcgatggcgatgtggtggtcgtatcgtacaagcacctcagtcggggtgaagagctggttccacgacgacgggtggctcagactgcgacgacgcaggtcgtccatgatgcgctggccgcgcgcgaactcctcgcgcagcacgcgcagcgtcgataggtttacatttacagcggtgttgaccgcagggaagcccggcgtgatgatcggcatgaggtgcgcgcggtcgtggatgttgtgcgccgggtcccattgaacgccgttgtcgaccttgccgccgttggacgggtgggccaccagaatgggcgtcggccagcgccaggaagcgagcaccgagaagaaccgatgcacgagcgacgccacgctcgcgcgcgggaacatttggcacacgaagcagaccagcagcgcccacgagatgcctccgaggtagccggccttgttcgagtacaggccgcggcgtcgggcccataggcggatcacgcgcagagtcgaccggaaaacgctggcgttgggcaccagctcgagaatgagcgaggccacgcgggccaccgacaacgaacgcaccgaggtcgcgtccatgccgcgcatgacctgcacgtcgtctccaggcaggaacggcaggtgcttaggcacggcctgcttctgggcgtagcgcgcgaacagcaagtccacgcgcacgctgctgagctggaacgacagcaccggaaccgcggccttcctcctcgcaacgaggtccgacactgacgcctccttgcccaggtgttcacacaatgagctgaagaagatctcggacgtgatagcgtgcggcatgaaggccacgacgtccagatccgactcggccatgccgaccttgaggtgccaactgccccccagcagcagcgtggcggtctccgtcgacttggtctcagtagctccttcgagcgcgtccagagtgcgacgcagccagatgtcgacgatccgctgcagctcgttgatcacgaggtgcttggcactcagttgctcgggcgtcggcagcggcgcaatggcgttgacacatttcatgagaccgttagtgctgcgcaggtcgtactcgttggggggtgacagctcggccgggaccacaatgggcacgacccgacgcaaaccgaaggctgcactgcgcaggatcttcaaataggccacctggtccttcatccggtggttcacgggcgatccgctgggcagtggcggctgctgcagggtcttctgtctgtcggtcctcttctccgtccaattggcgtggcacgcctcgagcgcgagctgcagaggctccgccgtctgtgctttcttcttggagacgggcgagcttctggggctggagcttgtgctgtcagagctatttgagctcgagctcgagctggagacggagccgacgtcgtcgctgctggccgtggacacgtcgtcgtcgtcccagatgtcgtggctgcttgagcagctcgtgcggcctccggagcaagtgtcgctgtcattcttgggcgagtcgaagtccggcaccttgggcgtctgcagcgcctgcttgagcttgcgcgtgcgctcggcgtctccccagcacaagcagttcataatatattgtgtgtattgcagagtacagtcggtcgaggtgctggcttggcttgctactgttcaagatcaagatcaagttgcagtcggctgctgtaataaggttccgaaagcaaaccacgctcggcccacgtccgcaatgtaaaagtgtcgggatggatcggcggcgctgggcttttcgctgctcctgttgctgttgctcttgtggcgagtacagtagtgcaagactgtaggggatgttggtcaaaggctctctctctgttgctttcaagccgacaaccgactcgacagtcttgcagccttctggtaaaacagcctgccgccagcggaacccgcagtcgcgtcagcaggttcaacgatccggcgccagacggtgacaaccgaacgcgagtgacaacgcgagccaagcaaacggcgaggcaaatccgagactgcgccgagctgatggcgatggcgaagatgatcgggggtgagagcagcgagacgagtgcggacgagcaagtcttggactgagtgagtgagtgagcgatgtgactctggaatcaagtgtaaaagtggccacgcgcaagagacccagacggacactatttatgtccagaggacctggagaagagccgaggccaaaatatacaaaaccaatttgagggattgggagttttggcaggaaggaatagggggcggagtttggttgactcacacctatggcgccatctgcgagatggcaaccgtagaggcgccttagctggtctttagacgacaagatgccgccgctgcacattgaagatcaatgggcaggcattgctgctgcgaggctttcttacctctgcctttggtacatgtaactgcgtgccatgttctggtagggatgcacagacgcactgactcttccttccttcggacaagcgcacgaactcaggccgcaaccttacgaaccagaatcatccgcttctggggcagaatgggttgtggtttttgatgggacgatgatttgagaggccacgactgcgcgctgtgctgttatgccgggcgagagtaagcaagagtcaacgccagcgaggtgctgtcggcagaaaactggtggccacggggagaagatgcattttttgcccttacacttactttcgttcgtggtcgtgaatctggattcggttgcacccagttacgcgtaggtaggcgtaccgtggctctggtatttcgcgcaacagcctgtcgtcgtcgcctggtcatcgtctcatcaacttttacgctgagggtgccggcaatagagcgcagctggaagtgccggcaatcgttcttgcgtgcagtcttagcgttgctggtaagcctggatatcctgtagtggatcattttgcgctggattgtgacgaaaagtactgtacgcgtctcgaaatgtacaaatcgcggaccacttcaacttgccggcccggcgcaggcctcggcgccgtgttcacgcgatggcgttcgttgatgcactggggcacatggcgttctcgagggccaggccccgccacgctcgttcgctcgtgcgatcagaacctcgctccgggaattgccggcgttgccggcaccggcacgatgcggcgcgaggtgccgctcgacgctcgacggccggagtcggagccgcggcaagactggcaagaattctttcgccgcagcagtccgtcgcacgagagcacgaagagctccgctaaatcgtggccggcgtggcgagggacctgctttgcgacaccgggcttggatacagaggccggacatgcaatgcgagcacgcgcgtgcgaccgcggacatcatgccggcgcgaggcccggcctgatgaaggttgcacccgctccctccagtctggagtccagacggccgcgcgacgagcagctagcacaacgcggcaatgccgacgacgctcgctcgcagtcgcgaaaaatgcgcgtcgccattagccaacgtgaggtcagtgtcctcacgtccgagcctgtccaggctggacaaaagcagcgactgacggactgccttgtcttgtggattccgtcacctggcgttgccaaacttgtcgcgctggtgaccgacttggactcatgttgccggcaaagcgatcaccagtaaatgctaccaaattctgttggggacacgtttgcagcacgcgaaggagaacctatttttcaatcgctttcattttcgccagtttgtcggcgtcaatacagtaacacggccacagtgtccgatacatggagaacggtggcatcggttcggttagccatttcagaagcctgttgctgcgttgtcggtggccaaaacctgccgcggtccaccaaaatgctgcttggatcgatcccacctcaccgctgcgtctcgctgcagagaggacgcttcaacttcaaatcgttattgatactttctcgtatgacctgacgtcagcctctcggcgctgcgttgcatgctaaagtctatcggataccgggacccaccgcctatgcatttagacgctgaccgcccagctcttcccagtccgactcgcggccttcttcttggcctgagcctcctcctccttcctccgcttttcctcctctaagcgcctcaatcgctcctgctcctgcgtgaactgctcgagctcggctgtggcctctgggtggaagtggcagacatcctcgaaaataagccggcgcagcgtgttcttgtccatgttgcccttgttttcgcgttcgaacgagaagtcgaacgcactcgtggctagacgctccgatcccatgtcaacgccgtccgcgcggcacggagctaggaacgggtgtgcgatggcctcgtccaccgtgatgcgcttacgcgggtcgaactgcagcagccccgtcatgagatctaaagcctcggtcggagcattcggacacacactgttcagtggcttggcctcttgcttctgctgacgcgccatccaccgcttggccttcatattcgtgacgaaccccatgtcgtcgggcggcggactacccacaagctggagaatcaaatgcaattgatgcacgtgatcgtgaccggggaacaatgccttgcgggtgaacatctccgctatgatgcatcccacagcccagagatcgatcgcggtagagtatcgacttgccagcagaagctcgggtgcacgataccaccgggtcaccacatattcagtcaaggcctcatccaatgcagcttccccgtcttggctccttggcgtgctgctcccatcgatgctgctcggtgtgaccggacggatgtcgatgccccgtgccagtccaaaatcgcaaagcttaaccaggcaatcgcggttaatcagcacattcgatggtttcacatcgcggtgaataatgtgcgcagagtgcacatatcgcaacccgcacagcaactggtacgtgatgaaagcgatgtggtcgctcgaaagtgcctccggtgaattgataactcggtgcaagtcggtttccatgaggtcggtgacgatgtacgtatcctcaaagttcgcgagcgaagggggccgcattacgtccagtacagacacaacgtgcgggtgacgcagatgcctcatgagccggatctcacgtacgatgcgcttcgcatccacaaggtcgtcgaaggtacgcgggatgttcttgatagccaccgagttccctgtgacttggtcgcttgctgcaatgacgactccgtacgcgccgtggccgatagcgcgaattagttgataccgtctgtacacgcggaacttggtcgacgctactgtgaacgtgtacatttcttcctcctcatccgacgacttcttgtcctgcttttcggcagcatctgtggcctctaccatctcgaagccacccagtgcgtcgtgggaatagcgttcagatacccgtcgacctgagcccgtctccttgtgcagctcctgtagcctatcgaaactcttgcgatgccttggcgtccttccactctgaattggagtacttccatctgctgaaatcacagattgctctccttcctcacccatgctctcatcgccatcttcgcccatcgagtcatcctcctccatgtaaggggcaaagctgatgctaagctccagacgtccacagctttcgttgtcacaccctcgtgcacccttctcgaaagtctcagctcggtagatgtcaaaccacttcggtacagccacagatgcaatctgctcttcagtcccctcggacgaacccaagtagtctgccaggtttatcttggcacaaccaacaagttcgtcaccgatgacaccaaggctccacacatcgacgcatagtgtagctgttgagcctggaacagcgccggagaactccaggtgcaacgtttcagcccaaaagggtcctttaccgctgccactttttactactcgtgtcgagtaggccttccagcaaccgacacggttcaatccatccgtgctaatagtcgtcacatctctgctgcttgtactgctggtgtttttcgttccaggagctttggtcgtgaggtgcgggaattcattcagcccaataatcactttgtatccactgcctccacctgttgcgggtttgcgtcttcggaaactctcgcccgatatacacaccacacgaatctcgcctggtggacatgtgctggcttgccgttcacgctctcgaggcagcgcggccaacgttggccccttcgcctcacccgtcactggacctgctccactgcccccgccattggcaaacgctaccgccgctgctgtcttgtccgcaagaatattaatgtggctaatgcgtccatcagcttcaaaccgcagctcgtgcttccacaaatgcctgaatcgccgtccactctccgcacttcgtatcgtttcccggcccgacacgaccgcaagatctccacgacgcgccacgtgctccacttcatagtgtgagacatccatggagccatgaaaattggcaaagaacgccaacatacccgagagtccgtgatactcgcccgcaatagggacactcggcggatagttcgacgtcaacgtaatgttcgggtgcaaactcggcatcagcagcgcaaaattccctttcctcgcttgaatacagccccacgcgtcgtaaaacatgttcagctccacactgacgggtgtgcccagcagcgttagcgtctgtactctgggtctcctcggtgtggacagcggcgccagcatcagcgtcttcctcggcgaggcctcaatcttggaccccaccgtcttcagcctcctctgcgccttgggcagcacattctgcacctggtccaccactgcgcccagcaggtggatccacagcacgcgctccagctcgctgtccactacaaggtgcagcggcttgctcttctccttggtcttgacgtggaagccgtgcggccgccccacattctccttatccacggccgtgacagtgtagcagtgcttcttgtcgatcaccacagagcccgagcctttcccagcgccgtccagttgcagctgctgctgctccagctccagcacttcgaggtagcggccgcgagactcgaacacgcgcagcgtcacgccgtccagactcaggtacacgtcgtcccagcgcggcagccagtcgcctttcttgcgggccggcccgtcccagtggatggggatcagctgcatcagcaggttggcgcccacggcgtcggacagtgacgtggccatgcccgacgccgcgcgcttgtgccgtcgttcgtggggctgctgcgggtccaaatgcggcgcgaccggagccggaggagggtcgggagatgtgcccgcgtctggggaagagaacgagcccccacccactggcggagacgccgcggaagcctccatcaggtcggcgcggcgagctcacctcaactcacctgggaccaaatcagtttcgaggcgaaaataatgttcctaaagtcatagaagaggggaatgatccccggtagagtgactgtagccatctcgatgtggcgattgaaggacagcgaaacatgctgcgctttgtatgtcaaggacccctacccgcgcccagcttgaccgtcgcgcattgatcatcggtagcatgagctcgcgcaggttcgtggagcagagcgtggtgacgtcgctggtgccgctgctcaagcgcaacctggccaagcagccgcctccgcgccatgacgcgccgttcgtggtaaggtggcgggcgtctaatcgagctgagaccgtccagaacttcccccaattgacaacctgttgctgttgcggattgcttgctgcctgtagcgcgcgagcgtggccgccgtgttccgatggagggagaaggagcagcagtcgctggagctgctgttcgtgcggcgaaccgtgaacgagaaggacacgtggagtgggcaggtggcgttccccggtggccgtcgccagaagaagaccaagatggatctcaacgcgctggacgacatctccggcgagtggacggactgggagtcgctcaaggagacggcacagcgcgagacgatggaggaggtcgggctcgacctcacgagtccgtacgtgtggtcactgggtttgttgcatgtccgctattgactaatatgacgttgtgtgctgcttgctacctaggcatgtccactggatcggcaacttgccgcctatcaacacacacctgcgctcgcttagcgtcagtactcatggtaagatgaacgcattacgtggtggttgagttcgctagtgctgacatttcgtctgcattcccccagtcttcttcattgacgtcgcagcggacgagcacgactacaagcccaaggtgcaggagtcggagatctcggacgtgttctgggtggacgtgcaggagctcttcaacacgcggcggtaccagattctctcctacccgctggaagacagtctcatgagtctgcgcatgcgtccgcagatactggcgctggcgaagaagatgctcggcaacatgcagttcgactgcatctacctgccgagacctggccacgcgccgcccgacgacgagcggattccggcccgcgaggtgaaggactttgtgctgtgggggctgacgctgcgtagcgtggtggagctctttaagacggcggggtatccgctgcccatgcgtccggacgcgcagcacttcgactcgaagctgctcggcgacattatcctgtactgcatgcgttacccggacaaggtcatcgccggcaccgccacgctttcggccatgctgctggtcggcgtcgtgtatagcaacctgtaggcaggcaggcaccttcaacggcacccttggcgtcgatgtcttagtcaacccgaacgaatagtgtactggttcaacgcattcatctcaatgaatgtccgtcgctgttcgttctcaaattccgggacggatcagaaacatcgattgagcgcagcggcagatggcggagttttttgccgagcatctaccgttgacgctcaaagcgctggggctgagccggccacggtcttatcgccggcagcggaccagcctcgccggattctttggcttgcttccagaaaaatcagaactttgccttcaccctgcaccgcaactcgatggctccaatccacttgccaatagctacaagatgagctccatagaccacctcctgcttggtgaatcgcttgtgccgatcatctcgactcgacggcaaccggatcccacgtgggtcgggcctataccaaaactattgggcacattttacaaaaattgatgtcccttataatacattctccaatcacaatggttctgtaaactcatcgcgtactctgattggctagaatctctaatcataatgagtaattcccggaattcttccactgacgacggcagagccctcggccggagccataatcgaaaacttcagtcgacaagacaaggaatcccctccgatctccggccttcccttccgctcttcgttgctgcgtgaatgatggacctgaacaacctcaagagcatggccaaccgggccggcaacacgctctacttcgcgggcgcggcggcggccgagatcggcaaggagaagggaacacaggcgctggcggcggcgtccggggccgcggcccaggtcaagagctctcagacgtaccagagcgccacggtggccgccacgctgggccgagagaaggtcaagacgtcgcaggccttccaggtggcatcctccgccgccaccgtcggcaaggagaaggccacgacggcggcgtccaccgccgcgacggtcgcgtcggctggccgcgtcaaggccgcgggcgcgtttgtgatggccaagaaccgcatcgctggcttcaagacgggcaagtcgcccaactccccgcagcccggcaacctgccgtcggccgagaaggagttctacaagtacgagatgtcggaggaagagaaggcgaagaagcgcgcgcaggcgcggcgtcgcgccgagaagaacaagcacccggtgtcgagctccagctcgagttcgagctcgcgacgagaaggcagttctagatcggccaccagttcgagctccagatctggcagcagcaagtccagtagcagcagtagtagctccagtagcaggagcggccatcggtcggccggaggcaacagccgacgacctggcagcagcagacgcaacaaaggagagcaccaattgtaggacgaacacgaagccagaagctgcaactcttaatgtactggtggtgcaaaccgtgagtcataaaagcgttcatgcgtcgtcttcactgcgaatgatgctcgtgtgctttcgacttgagcgttttgagcatccagtgctactaccggtattagagcccccccccaaaaaaaaacagtaataaaagcaacgctgcatcgggtaacccaccgatggacccatgtacgcatcgtccgaactcgctgcagtgcatgtattaatccctaccggtaggtctgtgaatacgaactgtggatgtgtcacccccggcacgcaatgaatgcgattttgaaataaatggtattcacgaaatgccatgtagtattcaatgcggggatactcaacgaagtacctcattgatgcagaaccacctcacatcgcgtcatccgcttcattccgaggcacagtactagcttacagcattctagcctgggccaccgcactgcggatcgcatcacaatccaacgtaaacttgcgcatcgagtcaaatgcgatcgggccgagcgactcgcaccgcggctcgtcttgatctcgactgtagatccatacgcagccctttcgagcatccacaatgacgccttcgcgagtccctgcttccatgaagactgccacctttgcttgtgcgtcttccaagttgtccgtcccggtcaagagttgcagaacgacagcggggacgcatggaggatacggcaacttcgacagcttcttatcagacatcatgcgagcgaaggtagcttcatccatgtaagcagcatcgggaacgagccaagcacgcccagccttcgttgtgagctgatagcccgcggagtggaaaaacatgacacctccgatctctgggttgtgtcgtttccagatcgagaactgtctgctcacttcgcctcgctgcactgatccgatgccgctcatggggtaatcgcgcacggtaagaatgggggacacgtactccagcagaaaacgtttttcggcgacttcgttcaaatcgggtggggtagtgagtctatacttgcctggaaccgcgggaatgcgatctccacccggtagcaggatgtagcccatgctctccagatgtccttccgcctcgagttggtgctccattggtccagcgcgcaaattgccgtatgaggcttctaccgatgattcttgttcttgctgctttagattgatcgagaacgagcgacaaattgaccgaagacatatcccactgatggtccccaagtttattcttgtgattctagttgaatctggcctcgcgaaagaggcacaaacgtgctgaatcttaacacgaaatctgccttgttaggcgaataaatatcctcgagtgtgcgtataatagcacattgagtttggctgtaagcagcataaaaagtagggggcgatagagcgccctccactaacagcttgcgtgcagctctgcgttttaaatattatctctactgattttgatgggttgcggcacaatttaccatcgatcaaggtaacatcccgaagaaaaatatagaaacttgtataacagtgggtctcagttctggcagcagcaagatagcgctcttacaaatcttgaaggatatgagctgtgattggttaaaagtttttttaacttaaaactcggttgctatcttgctgctgacccgtttccatactgccacgattttggtgcagtatagcgccggcagcagcaagatggatcccacctattgccggaccgccccaggagcgacggcagcgggagccgacgttcccccgacgtatatgagtcctccacaggtgctttcgttagatccgatagcattgggctgctggggttgagcggatcgaccgccgcggggtcaatctgacctccaccgaccccgtagcagtgagtcctcgcatcgaaagcatgtgacaacttgccgcagcacgctgctgggcacctataacatgtatatatgtatgagagcactatgtagttgagcaataggctaaatgagcaagaagaccacgcatgaggcatcttgctgctgtcgaactgcaaagggggtctcagttcgttccgtctctgattgggagaaatttggagggttttcggagagcgctatcttgctgccagaactgagacccactaacgattcaatcaatcggctcactatatgagaaacgaggcagagaattcaccatctagttacgtctagcctgtcaatctttttacgaactgcgcactacgccgtttctgccattcctgttttctcgctgtgctgaatgcgccaccccgcacgcccaggaagcccgccagacctctttctccatatgatggcggcattcacgtgcgcccgcgaccagacaagtaagtgtgcagcatatgcgtcgctagtggcatcgcccaggaactccacattggacgccgcaactgcgtgcttaatctgtaacgtgagtgaaattcagtacatggcgcgatgtttgtgttttgtccgagttcttagtttcggctcaaaaagtgtcatactcgcatcgcaacccagacaaacattttcggtcgtcatttttgggcagtaatgaacatcagtctctgcgagagacaccaagctgactaactgagtaatggccgagcaagtgctgagctcgcgatgcacgtttgcatttacacactctcccatttaccggcaaagaacaagaagacccaatggccttggacggcaactggaacgctgaaatactggaggcggaaaaccaagttgcggagtgggcagcaggggaacatcgttttcgtgcgctgtatgcgcgcggtttctttctgttcaaggggtcgtcaagtcgacctactaacctgagattgtacgcgccggatatctccatcatcgacgaggacgcgattgacctgccaaatgctgaacccctgcctggtgtgcctaaagtggtgatttacatcgccgacgaaagcgacgacgtcgacgacttaatcaagttcgtggccgcctacgtgaattggggttcggatcaaggtgtggttgttgatacgtaccatgagcaagtttgggtgcagctgaaaggctgtgcccccagctccggaccatggacgatcattggcttcgtcatcccgggtcgcttgatccaggcgccattcgtcgtgcgcgcttgacctatcaagagctgtcggagtaaggagaaagcaagatgagcaggtcctgcgccaggaagattcgtgtgccggtattcgagcggacgtgaacgatgatagagaaagcggactggggccgaggagcctcacgaggatcgcctttatagatcatggatttattgtgacacgatgaccatgtcgtcgagccgctcaatgggtcgtagttgaggcgctcaaccgtgacaagacaaggcacacgtgatatccaggtaaatgcgttctgccgtaagcacgtggccaagctcaggaagcacgacgctcccattgatgaacacacgacacttgacgtcgcgcgcagctcaccattgaggagaagaccaagatacctctcgtgaccacgcgaaagtcgttgtcaaagtaccagaacaacgcgcagaaccgttcacgtccggagccaaggccgcgctcagcacagtgttgctctcgtacagcgctgactggcgctcgagcgagacgacgccggccacgttcgagacccaccgcccgtggttcaaggtatgggtcctaaatctcatagagacctcgcacgaactgcacgtagtccagctcgtcttcgttgcgcgcggttctctcagccagcagcacttcaactacaaactcgccccaaggttttcctggccggtcgtacgggttgagactgcggaagagcgagctgctgctgctgctgcttgtgtggccgttgctgagcttgttctggactcggcggtacttgcgactcgactgccgcgttggtgagtcactgcgctgaattccgtccgctgtccgagtctggcctgctgagtcttgacgacgctggttactttcgcgcggagactctcgctgtgggtcttggcaaggagacgcttgctgctcagcttgtgggtgctcgcgaggagatgatcgctgttcaacgtgtggatcttcacgaggagatgctggctgctcggctggtgggtcttggcgaggagaaggttgtgcttcggctgatggatcttgagacgaagcttggccttgagttgacgcggaggaaggacgttgtgcttgatcctgagggggttcatcttgtgaaggccgacttccgttcaccacgtcctgagttggaggcgtcggttgctcgacgggcaacaattctccctgactcgtgagctcctgcgtcgcaatgatgtcctcttccgtctccgataattgcagagctgagtcccgaaacgcgtctccgtcttcctccgacgtcgggtcatggtacgagctgtctccttccgactccacgctcctcttgcgtcctctcttcttgatatgggtcgtgctagcagcctgcgatctagtgtgtcggcgctgctcgttgtcactattattgcgagatctcgacctggtgcttctgcgtggtaccagcggttcatcctcactgtcctcgtatcgcgtcgccctgttcatagattgccccctcgtcaccctcctggtctcatcagtctccggtgctctccgtgttttcctagtgttagccaccggaagtagcggttcatcatcactgccatcgtccttcgcggctgtttgtctcttgtggtgctcctcaggctccggcgtcggcgtcttctgtgcttttctggttttggtcgcagcagccggcgattcttcaccccctgcgtccttcgtcgccgtagtcgtcggcgccttctttggacgttcttcaatctccgccgttggtgtcggcgttggtgcgctccgtgttttatcgagcggttcatcgtcactgtccacttccttcgtcgccgtcgctggctgtttcttttgcgaggtcgccttcttatgccgatcttcatgctccggtgtcggtgccgtcggtgccgtctgtgctttcttaccgttggccaccgtagtcggcggttcaccattagtggtatccttcgccgtcgccgccgccgttggagccctcatttggcgttgttccggtgtcctttgagggttcctagtgctagccggcgccgccactggagctgcaccactatcagcgctcgtcgtcgttgtcgccgtactctgcggctcaggtgtcggcgtcctccgcgcgttcccattgctcgccaccgccggctgtggcgtcctgccgttgtccccgttcgggtcgatgaagcgcaagatcggctcgggcaggaacttgcccgcccggaccgcaaactcctcgatcgtgcggtcctcgatgctgtagctggcgtccttgcccttcatggcgtccacgaagatcagcagctgcgccgcccagcgcgccgtggggaccttgccgtccaccacgcgccgcatctgggcgcccagctcgcgcatctcgaccagcgaccactgcgcgcagccgtcggagctgcgcgtggcgctgctgagcttcatgctgatggcgcccgtgcgcagcgcgtgcagcatggccatgcacgcgccctgcgagttggccggccactggcgctcgccgcacacggccacgaacgccgtgtacgtttcgtcgtgccagctccaggccgcgtccccgcggtagcccacccagccctcgtccacctccagcagcagccgcgccacctcggccgtccacggctcgttgtggaacatgatggtcgcctcgctcgcgcccgctcggggcgttgccatcgtccagcaggatttacactattgaaggcaaagccgaaaagctaaatatagacggggcggtttccatacaaactcaagtcatttcggttttgtgtaggcaagttactgccacgcacctgttacggtactgctctaacggtaaaacggtttggtaatttgtcattacactcgactctatctaatagcgtgtctacattggcgtttttaggtagtatctgtccacgacgctctcgatactagcctttgctggcctggagctagctactaactctgttttgtctgggggatcgacgctttgctgggcattggctcggcctggaggttcttgcgcttgtagaacaggatgtaggctgcgttcgacttgacctgactaggcatcgctggcgtaacgagactgtcatcgaaagagtaccagccggggaacatctcgccatcaccgtccttccagctcttggcgaaggccgtgtagtggccgaagcccatgctgccgtagtggttgctcacagcgaacaggtcgtagcttaggtggtccttctcactgctcttctcgaggcagtacggcgacatgtccagaccctccagcgggaagtccacgtacacgtccagcttgtcgcgcaggatctcgttgcggtactcgaaccgcttgagcgacagcacgagcacgtccggcagacgccacatctccatggtcttgcgcgcttgccggtgctctttacaggtggagcagtaccacaagttagactggtctagcgtttccggtttcacaaagttcctgaaacagtcatccagagaaatgccctcgtgcgcacgggatccgctcgacttcccacgcatgctctcatggttgacgattctttccacatcaggccgaggagatgcagacgaggacagcatcgatgatgaccaggcaacagtagcgaacaccagctcgtcagaagaatcgtcatcattcagcgtagcgaagtcggaaaacttcgcgtcggcagcgagcggaacggactcgttccgcaagtacataccatcgcggtctgataaatacacgcattgagatagcatgttgcttgggattttcgcgctggacgactgagaaacgtgcgaattcagcaagtcgctccatttgtccagcatctccgcacacgtagacgaagccgtgtaggtgaagagcagcggatcgcccttcagagtagaccccattcggtgataaaggaatccgtactgcacagattctttagtcggcatgtagtccactcggtacatgaggatccgatcatcttctcgtagtcggttcaagcgttccgtatccccgataatccggtaggtcattgactgatagatatcagctgccagaagagcactagggctcacaccacagagcttcgccactgctcgcttcagcacgagaacacttcccttcttgggtacttcgactaggtaccgagtcatggacttgcccggctcacttgggacgaaaatgacttctatctggcggttcatctgctgcggcagctccaactggatgcagttaaacggatcgaacgtgatcgagaccttgttgcagattggacacacgaccgtcgacttgaactgaccctgaacgtgatccacgaagatgctgtcatttcggagcaggtggtgttcccacgcttccttggccacggcagcgtcgtcctgcgagccatctgactctttcacctcggtgtaaggcttgtgcttgacgcgattcagatcttcatgcaagccatcaatgatgtatgcaagcaactcctgcgcgtcatgctgttggaatccagaaaactgaggtgcaaaacgactgatggcacgcttcagattggccggagaagtgctgggtaccgtaccaaaccacagctccttcagcaagccgtcgtactcttcagcaaggttgccacccgttcctagcggattgtcgcggttcagatccttcttgtagcgattgctcaagaaataacgagtaagcagctccacgtggctcaggcactgcagcgccgagttcataaagcacgtgttgccaaggttacgaagacccatcttgcctcgccgctctgctttcaagccctgcagaatttcgtcttctttctcttcagctgtcagcgtcgagcggcacacgcccttgtgatacttccagtgggacatctgacagttcgcaccgcagtaccaaatgagctggcagttgccacaccgcttcagagaccctgcagtcttccggcaggcgccacagagcttagggatcgagctgttcacagcactgggtttccgctgcacagctagcttgcccccagtagccccgtcatctttcgtgccattcgcctcggcctttgtttcattcttcttctgtgctggagtgccttttgcgccgcttgtcgtagtcgtaacttctggctcgtcatcttccggttgttcctggaatacacaaaatattccttcagtaaatcagtctcttgaagtatcaaacagcagtatctactgtatagacgtaccgggtagacattcacacggttgaacacgttgccgagctcgggatctcccacctgcacgacaaagcgtgcgatggtcggccctccgccgtaccaaatcaccagagcgtcccagacttcctgtgggataagcacatagtgataattctccttaagctgcggccgcagcgggccgcccatgagctcgtccagcgacgtctccgagctcacgtggagcagcggcaggttgttgatgcggctgggcgcggggttgcccgctcccgccgagggcgcgtcctgcttgtcgtcgtagcccacgaactcgcaccagcgctcccaccacttggccgagagcacgaagcgcttgtcccccacctgcagcccctgctggtccgcctgcgtcatgaggcgcttgacgatcgcgcgctgcttgctgcggtccagccgcttggccgcgccattgggcagcgggtttcctcctttccccgagccattggcgtctgcgttctgactggcgggggccgccgaggggtcctccgcgggcgctccgttctgcttgggcgcgtggcgcttgtggcccttcttcgactgcttcttcttgccctgatggaggtagaacggcggatattaaggaaggagaatgaggtagagcgagcgtagaacacgtatatcaagtggggaatacgccgcacagcgcccagaagcgacgcagcactctcatacataccttggccatggtccctcgctgccggagctggtgatcttttggtactgctccctaatttcgggtaaaagctaattttcaggtaaaataatgtggcccacaccgacttcaatccgaaaataccaagtgtgacccagaagccatggctccacctggggcgctgccgccagcgccggcgccgcgcgtggaggagctgatcctgcgcggcgccgacgtgagcgtgctgaaccacacgacgctgtcgctgtggcacttccggcagctggcgctcgagctgctgccgtccgcggcggagcgcgagccggaggaggaccaggaccgactcaagacggccgacacgccgacagcagagccgcctacgcgcggcatcgagctgggcgagggcatgagcgtggccgccgtgctgttcgagcagccgccgaacgcgctcaagcccgagaagagcggcccggcggccgcaggggacaacaatagcaggacagagcgctccagacccgtgctgcagctgcagggcgtgaccaccagcgtccagggacacatgacgccggacacgcgcgtcgccgccgtgttccagcgctaccgctgcgtgctgtgcctggacgcgtcgccctccatcctgtccatcgacccgtcgagcggccgcctgttcctggacttgctctacgagagcgtggagctcttcatctggagcatgctgcggcccatggaggtcggcggcgtggccttcacgccggagctgcacgtgtccgtgctggtgcagggcgctctcgtggagtctctctgcgtgatcatgcagggttatatcgtcaccccgtccaacgctgcgagcttcctgcagctcatcaaggaccgattccagctcatcgagaacgactgggcgacccaggcgcaagagctcggacagtgggggtatctaggcaatgcgatgcccgcgtcgctcgactggatcttgcagaacgcggtctttgcgttgaactcgctgccttccgactgcgcgccgatggtggtgctggttacagatggcgtcgtggatgtacgtgatgcatactcgtatgataacttgttgatgcagctggtgcggcatgatattcaatgccatttcttgcggatcggaggaggtggagaggatgaattgagcgctacgtttggattcgtcccggacacgcatctattgcgattcgtggcggagtatacgggtggaacagtgtttgattatgcagctatccacgaggcgtgctatgggacgacaagtacatgcagcaatgttgtgaagaagatgacgggtctgcaggatgcgtgtttcctgcgcaagtcgagcgtgcacgcaaactcggcccctgtggtgaagctgaacgagatggacagcacttctttcgatggcaggacgttgctgcctctccgtccgtatcgtatgtggcgtgaaaaggtgcacgagtatcgtattttcgcagacgtgaaccggatcgtggaggcgcgactttgtgaaggattttccatcaataaggtttacgtgaagacttaccagcagccggtgctggcggatggaggatcgaatcaaacaaccgtggattctcccaggcattctattggtggcagtggagctgcgaacgcctcgaatgggcgctcgagcgaagtcacgaagatcttgattgtgttcttgctgcaatggaaacagaacgtgtggcttgagtatgttgtgtctacaaccacggacaacgcagcaactcctgcggcgtcagctactacaacgtcccatccgggccgtcgaccaagtggacaaggtttgaaagggacttcttcgtcaactaagaaacctgcatctatattttccaaggatcagacagcggcgtggagtgagtggtatgtcaagatgaacatattggcgtatgcagactttctccgtgcgtttgaagatacgatccagcgcccttcagctggtggggacaggaacacaagtgctgcagcccgagggcacggtggggacgtttccatggcgtcaccagttttcgttcacgattttatacgcaatgttcaggacgtcgatcgtgtgttattgcacctgatgacggcgacggctagtatcagtgaaagcagcgactccgttgccaatcagttctcttttgggacagcaaacgcgtcgtcaacgtcagtgactccaaagattaccagctcgcacccggtgttcaacattatcggtgaactctctacagtgttgtggcaccgatggttttccgtggagcgctttgagattatttgtgttgttaagagtgatgcgtgtacggatctattttatcgaaatgagatgcacggagtggtggagcgcggcaatgcaggctcgcatttgcgcggtgcggggaatgcgtcacaaggaatgattcacagccacggcaccaatgtgtacgggacgaatagcggaaatatttctatcggagttgagagccttgctgagcctctggtcgcgattcttgtgaagtggtcatcacaaaagctgtcgcaggatttgtttttgaaattcctttatacgtccgctacggacaaaagtcacgcacccccaagagccaaagcatcgccgtcatcagcaacagcgtcaggaggaatcgcaatgcgacgtcgtcagcgcagtcagaacaacaatggaggagacgatggtgcccaaggcgaagaaggcagcagcacaaaagagagcaaagcggctctgtgcttcgtgcggctcgaatttaagaacaaaacgctatgtgcggttcacgtggccttctttgcgacgagagcatcaactcggcgacaagtgctgagtgatctgaaaagcacgatttttgctggtatcaatgaagtcgcggtaactccctctccagcaaaattactctcgccttcgatggcggaaactcctgtcatactctgtcatcgcatgctgagccgtcttcttgtaacgcacgacactctcctactccatgggcttgaccaggaaccaggcccctttgactattatgtggcatcgccgacattggaggccgagaagaatgctggggctattccgccatccactacgtgctgcggtggtagtgaattgcagttgcaccgagtttttggcgcatacgtatggcattcgagttggaaatggaaagtagcgaatctgacggcgttgctggacgtgatgcggcggctacatgacgccagaatcagctgtggattttgggtgctggactggaaaatggaggaaggagacgatggacaaggtgcgcacgttgaaagcgtggtttttggaagggagattttgatggaagatgaaaagggtcacacaaagacggcattagtgcagtatgcgcttcgtcgcgtctcggatacctgcttaatgacctcattctggatggaacctcagcacggcactgtgaaaacgcggctttccgatgaagtcgatcataacgacaaatttcactggagtttaaagcaagcgattgggcactcagcgccatttgaaaactatgaaagccgtggtgtgaatcggagtagcaccccgcgagggagtgaccgattgtctgtatcgtcaatagggtcggtggaagacgagcagaaatcgatggagcaagaggatgtaagtattgattgggatggtggctctacatacctgggtgaaagtgaattgctccacctaatacgcggctacctattcaagagtgaccgacactttctttcgtgtttgtacacgttcgattgcatcctcaatttgcgtgagaacatcgagttgctgaatcagttgagcaaggacgtcgagggtatcgtaggctccaactggagcatggataggcaaatggcagctgagaacggcatgatactccctcctttcagcacagcgaggctcctggctacttcaaaacggtcaacagagcatttcctgatgtatctgcaaaatgagaaaacttctacgagcacagtggatgaatcaaacactgttggaatcccgccttcagtatcatcagctaacgagaatctctattctatgctggagcttactctcagagggttgagcgactgtgaagtgtcatggacggactacaatggtgatgtcgtcgcggaagctggcatgtctacgagtaatgctattgaagatgatcggtttttccgggaaggcatggatggccagctgcccttgtggctgaaggatcacctagcactgacgttcaaggaccgagtaccgcaccatgcgttgagtaaaggcaagtgcttcgttaagctcgtgagtgatgattgtgtggttttagcattcttcccttccttggatactctgcaagttcaaagcaagggtgcgggcaaggcatcttcatttaaagcaagtgatctcgaagatgcgtttgacagcaagttgaacctgcctaaaagggcacctggaaaagaagagggtcgcgacgcatctactcagcagcagttttctgttcgcgcggcggaggaagatggagcaaaggctcgagttgtgcgaatgtcagtgtccgcggatgatatcgtgctttaccaagaacgccggcgcagtttccgcgaaggctacaaatcttggagaatggggcattaccagggatcccgtgatgaaaagcaaagttatggccgtgatttccagaaactgcgtctcccttcaactccggaagatcatgaattctgtgaggagatcagtcgtcgtgcgtcgtatggctgtgattttcatctgctgattgaaagtaccaacggcgtcatgggatcgggcttctttcaagttgcattttatgagtgctcgctcaccagactttccacagacttgcatgataatagcactcaaatgctggatcgtgtggatttgcctcacacaattttgaagcagctattcttctcaaggcgaagcggcaaagcaagagaggatcggccggcgttgcctcttgaccgaagtgggctatggaaaaagtctccggcagcgcgatcagcttctgaccctggtgcgaattcgcatcctcgacagagtcctgacagcgttcttgcgtctcgtcggttccgcaagaaggtgaagcgggcgcatgaacacaatttctcccgtggcgtgtacatggctctacgtgaaggaggagctgtccagcatagcgatctgttgcaggcgctctcaagttgcattgaagtccccgttgatgttgacatcacgcttctgtatcgtatgatggaaactgctgcatcgcataagataccgcctctgagcccagcagctgccgcggtggtgtcagcaggcatcggtgcagatattctgaaggataagctgacgaagtcttttgaaacgatactttcgagtgtgtttgtccccatcgctggaacgaagtactactatttcacgggtaacgaaaacaccgtatacgaggacatatcctcgagcgaatacgatttgcatgtcctcatggaggattcggacgacaatgacggcgaggcgggccaaaagagagatgaacaccaatcgcgtgacgatgcaggcgtcagtagtgaccagggactgcagcttagtcgcagtgttggcgagggcggcaacgcacagaaaccggcgtctgaagcaggggcatacaacggccaaaaacgagtgaatcgcagacgtggtagcttggggcgtgaaccaccacctcctgtcaatacttcaccagaagataactctagcaacgagcagcatcaagcaaacgtggaagaggatgccgaggttaataaagaggtggcggtggcaacatccagcttctcggtgccattcttcttcaggtttgagtgccgtgtgctcaatggttcgagagatgctcggtcgaactcggcggacacgcactcgacaggagttccacctgactctgacgttcttcgtcgatctgctagtactgccgcgtacgaggatatgcgaaaggatatggtggcacaagctcagctgacttctccgagcagtcgacaggaagagtttaatgcttttttggcgtcgattaaagcgagtcaaggttcgcgaagaagttcgacatcggctgacgtcacgcacattgccgagtcattttcggatacgccattgggccgcattgcattgcgcttagtgactctcactttaccaaatgaacgagcgcttgacggtggacgtgtggcatctccgatgccgtttgaaatggacaatggtcaagccaacaaaaacaattcgttgccgtccatgcgaacccacaacttctccacattgcaccttttccagcgtcaagtcttgacacgggtgcgcaaagacattaaggagtggtgcagtatcgagatattgtcaattctgcagtcggcaaacaaaattactccggcgattggttctctggtccagcgactctttgatgatttgcctgatgacgccgtgacgaaagcgaagtatccgctggaattcgtggctcgcagccaagaaacgccagtaaacccgattgatttgtttaagcgcgagttcgagaagggcgatttgcttatggttcaccagtgcaatggagtgtactttgtggtggagaagcagaaatctgctgacacgagtgtggacagtttggtcaagagcgacgtcagttttaaaatcccttattgggcatactttgagctgggaagtgatcatataagcttgcgacttcaccacccggaccgctttggggcatcgtctagtggattcaatcggttggaggttcttacccgccttcagcttggagtgcgtgcggtttgtcgccgtgttaaccagttcttgcttttgctgcaacttcacgagacgcgcacatgcaatgggcttctgtttccaccaaacggcaacttgccatccagtccccgttcgcctaagcggcgaaacgggtcgcaaggagcttttgattcaatgggcggtcaagatggacagaggaagcaaaccaacttcttctggccaggccaattcgagtgtgatctgcggtattctgctttcttcaagcttcatgagcgtttggcacccaacttcgctctcaacatgctgtgtacatcagcattagagcattttcaagtgcacaaccgtcgtcacatttttgtgtatcgcgaccgcgatgggcacgtgttttacatgaagatcagcatttactatgacatgtcactctcttcagctgctggaggacaagcggccgaagaacgtcaagagcgcggtggtctttcgcgttcgagtactggaggaagtaccggtggtgcaagtgtaacaaccgctacaacacccgcgggggtacctggaattcgactggaagtgtttggtgtgtctgatccgggtgaagaaataacccacgaattgtgtcgcttgctggagaggaagctggacgaagctactcaggttgtgctcatgaagctgctggcccgaaacaccaagttccagttaagccagacagacttggcgtttttgtgcccgccgtctgctccgccagcaagtgtggtggagtatatcttacctggtgaggtgaatgagtgctccagattgctgcactacttgtcgcaaacgcttaagctgtccccgtatgtccgccctgtatcatgcggaggatcattgaccgcacggaattcgcgggagccaacgagtggatcatatcgcagggtgcggcgcggaagcctgtcgtctgcgggtagcactgtcagccttccgggtgaggaattctcgaaggcaatagtgaaggggcatgatcaaacaagaggagcaaacctcggtgcggatgatactgatcacgacagcactcggacacacccagcatgctttggcgattatcggaaagcgttggccaaggtacaagaacaatatggagatcctgtgccgttcaatgcagcaattcgatctcctgttttctacttgacgccgaatggggcggcaaacagggtggacatttcagccggactatcaccttcaaccccccagcttgtcgcgcagacgtcctatgttctcaacctgaacccggacctgcggctatcgccaggattcatgtcccgagtaggcaagggccttgcacttatgcgcgtcgatctcatccggaacacttcttctaaaatggaacgtggagataagaagaaggagggagctagttcggaaagcgctcaaaaagtcaaacgcgtccatgatatccccgggctcgcagcgttgtacccagaagttgaagaggctccccaacaaaacacaataccggtggtagccaggtgccaagtttggattcgcggatctatccatacagcagagttaagtcaagttgtggaggcattcatggacgaggcgctttacgattatcacattgaagcaacggtcaagaaactcgggatctccatgcagcggcaaaatgctgccagtagcgatgctgtttctggtgaggaggcccattcagatatactggatctgtcgggtagtcacacgaaattaccagacgaagtggacacgttggtgtcgctcttcaagagcgcatgcctcttgccatcgtcctccgtgacaaatttgggtgtaaacctgtccattgcgccatgggacctcgaaaacgctgtggcacaagtacggagctttctgagttgccttcctcatcacctccgccctgcagtttatgcgaagtcgaagctgtcaggggcttatgcgagtgttgccaaccgcagcgatagtgtgcacatattttccaactcgagcgagccgtacgctgaagatttccgactggttgtcaagcatgttggtgatcccgatgcatacgacgctcaggactcaagtgactccgatgcagaaacgacggcatccatgagctcagcgctccaccatatcgagccattgatgcgaacggattcaattcattctgaaatttcagatttggattctgtttcaggtcgcatgccgcttacatgggcatcaactggtgcaagttccgagtcaaatctgataccggccgcgccctctgtatcctcgacaacgtcttcgtcaatggttggagttatggcaagtctgtcgcaccagccacatcttccaaagagcacaagcttttcggagagagacgtgttgctatactctaacagcagcagtcaccatcaccataaatcggattctagtgaagccgcggaggtgaagcggtcgttttactacatcgtggatttgtccacgagcaagggcttgcagttgtacggctacaacatgagttctgcgttggtggaggcattggcaacacatttggcacgcgtgctgacctggagcatgcttcgtgaaaaacttttacgaagtcttttgttggagaaatcgggtctttcagcggcagctcctattggttctatcgtgctgcagccgcgcagtctgttcctgaccatcggaagaacggaacgaactgggaagagcatgggcaaaagtaccgccgtactgtgcaaggattctgcagtgcatttcatcgaatatcgccccccagtgctatctatcctgcagaccaacgagtggtttccaagagtgttggatgcaagtcgtctgcgctcaatcgacggctttgccatggggacctacttacgtgaagcgcagacgcaatccgcctcagaggcgcttgagtcccaataccagcgacctcgaggaaaaagcaacacaaatatgggtgcacaattggggccaccgagtatccctgaccttacgcgagaagtgtcggggccgtcactgtcgcagcgaagcatgcacagcagcggggatggtaccaaccactccgggggacccctcggcaggacgaagagtggtggcatagttacaggaagcaatgcctccgacagtgtgtcgtcgtccccaaacaagcgtctaaatggaccaggccctggaatgccattcccaggaggcaatcgaagcgatgttgcagcacgaatgagaggtggcgcaggagctgctacggcactcatggcagcacgtgcgcgggcacggggaggcgggctccctggtcgaatgggtggaggaccaggcgttagcggaacaagatgttcaagctctggatcaacttcaacgggggcagatagtgttgccccgtgggatttaccgcttcataacaccaagggaccgcgtctacacacttcggctgatggagcagattcgagtgcggctactgctaaggacggcgatgatacaagtatgaatacctctgcagcggtagcaacaagctcggagcagaagacgagtacacgtcgaagaggttccgggcagaccgatttggtgacaacgtcctcatcatcttcgttgtcagggctgccactagcttcgccatcaattcatcgcaggagtagcaaggagacagcggcaagtgatcccggccgaattcatagttcctggaaaaagcgcttggagtgtgcttggggacctcggttcttgttccccgggaatgcagagcgttggtcggcaaaaattacagcggatcggcggctacacttcatggagttggaagaggacgaagagggagctctacccaagaagaatcatgctcctttgccttacttctgcgcagcgttggagaagcgttgggaggctttcgaaacccgatccactagccacactgtgggtatcaatctgttgggcagacttgcctcgatgggtcctgatgaagagatggaggagcctgttgcaaaggatgttgtggcgaatatggtagccagtggacaccttttactacatcagcgtttccgggctgcgtttgtagagcgatgggtagccgcaaagatggctggggcgacaacagacgaagttggagaagatgggagcagtcgtcttagcgcgctgcagtcgagtatggatctggtgaatttgctgagctataagcgtgaatttgttttcgatagcgacgagtgctccgtggcgaagctgtacacagagcacaccgtctatagcatgggtgcgggagctggtgctgatgttaggggaatcaaacagcaagtggccgcaaatttggagccgttgcgtctagaagtggcgagcgagttctataaggagtttgccgttcacttgagaacgcttggattccgacaacttcgtacgattaacacaagcaggactcatgcgcgcgcgttcccagtcggcgctacgaatgatggcgatgcagcaagcggagagggcttctcggagtacttatatcaccctgaaagagctgctgcagaagctgggggctggaaagcggacccgaacaacaacagctctggtgcatacccgctcacagtggtggtgctagaagtaaaatgtgatcaccgaggagtgcggttgactgctgtgctcgtaagcatgcacgacttggagcagcaggacttacgtttccagaaccgtttggctgcgaaggcgggaaagcggattattcccacgtccggcgtgagggtgcagtgcgttgcgaagtggttacgtgcccagctcaaaactcaagctctcatttatggatttacgattcgttacttccagcagcacctgcttcagtgggttggcgccactgatgattttcataacagtcagagtggacccagccacagtgtcagcgagcaccttggcgaagatgatgcactggtggcaaccccacccgtgccatggaaaaatgcttccacgttccaaaacattgtcaaggggctgcagtgcttcctgcacacgttccctgatccaccagaggagccaaagaagcataccacagcggtactgtcagcttcaaccacgagtaaaagaatcgctgacaagagagccactacaacgcctcaagcgaccaccacaccaccaaccagtggtggaccccgatcgtctttgcgccactcgagattgttgcggcgagcagcggctaaacagcagcagcatcaacagcaaccagcccacccagagttagcccccgccccacgtgatgcagtgcccaaagccaccgcgccattgtcttcgctctggcatgactgcgtgatccggatggaaacggtggcgctgcaaccaacgtcgctgcaatcgaactgcgttgagtcgatcttggtgcagattttgctgcggtacattgcatgccacgggtcacgctatgaggtactggatctcctgcagtttggcacacccgatgcggttgtgtgccattcctcgtcgggtagtttctaccatcggcccccgtcaacgattataccgacgatccaaagtcgcaaggtggaaccttctggtggatactcactggtgatcacgacgcagccgctgacgaagaaacctctggataaggactccgtgcagcttctcttgttgaaaagcacgccgtcagcgcttggtgtgggcaatggagtgcttgcggtggagcgagcgctacaggaggctcagttgtttacgcgcgaattgttccacgttgctgcgcaacactacgagcgtgatctgctgtggtctcgcttactgtttgacggcactcgcggtccgggcgccgaagtcgcacgcacgcttgcattgccgccggacttgtttcgcgtggaagtgggcccacagcagctggaagagtgccttcggttgtcaatttgcaccccattggatacgctggatccgaggctggacgagcttctgcacgtgtccggtgtgtgttggcaggagctggcgctacgcctgcgggacctctacgccgatcagttacgcgagttccagttccaagaggaagacgagaacagtagccacttgctgctgctgtgccccgacacgttcgacttcatcatccacttgacgttcatcacgcccaaggatcagccggtgacttggcctgcgctggccgaagatggagatctcagtgtcagtggcgacgaaagcatcgacagctcaagtagtagaagcgccagcatcaacggcagccacgtgagcggcatcagcgaggagttcagcgaagccggcttcacggaggaggcccaaggcgacctgcgtgtcgagatctgccgccgagaggagccgaccaacaagcagttcacgttcgcgcagcggcgctcgatcgcggagttcgtcaactgcatcgtgcactggcagtggcgcagcctgatctacgactgaagcgacgtggctacagttggcaagttgaagttgttatgtatgggtaggtaatgaaatgaacgtagcattgcattctacagtactgtatcgcctggaattgataacacaagaccacaaacgatcgtcttggaagacggtcttccccatacaaagcctcgaacacttggcagcacagaacgaagtcagcgaatcgctggcatgaagtcggatcgtcggggcttgtctctaactgcagtgcgtctacacgcagctcaagacagatgtcctcggcgaacgtggcgcggcgtagccagagttgttgatcgtggtcgttgcttgcttattgctgctgagcggcgactgcatattgtagccaccaatatctcgtcgcctttcagcgaccgcctatcgaccaaagacgcgatgagatggtccgagccactcaagctgcggggacaggcttggtcacttccattgcgttggatggcctcagctcggcttgaaacgctgcggccattgttggtccaccaccgaccctcgcttcaagacagtctcattcgcgatggattttcagggaaatgacatgccacaagacaggctgaaattaccgcctgtctgcctcattgacttgatctcactatgctcgtgcgggacaagcccggtgtgcaccacacatgtatgccttcccacagttctgaaatgtgcataacgcgaccaattttgatgggcattgcatcccgcccgttacaaattgcttcagtatcggagcccttgtctcgtagtgaattgatcacttcgcaacaagacccctccctccgccctccctgttctacccgccctacctcctgccccagtatggacgaccacttcgacgtggagtggcgccaagacgcgctgggcctgcgcttcacgcccaaccagaacgaccagccggtggtgtgccaagtgccgcccaacgcctgcgccgccgtgctggcgtctccgctggccgtgggcgacgtgctcgtggccttcgacctgcagcagtccgagggcatgcagcccgtcaaggccttcgaccagctggtgacggtgctgcggcgcgccaagctgccggtcacgctgcgcttccagtcgcgggagaaggagatcccgcccaaggtggacgaggccgacgtggcccgcagttacgtgttcagctggctgccgcagtcgcctctcggcgtgtcgttggccatggacccgtgctcgctgcacgccgccgtcacggccatcgaccccaacaagatctcgccggccttccagaacctcatgccggtgctcggcgacgtgctggttgctatcgccccggacagcgacaacggaccagtgacgcgtctcgacgagatgcgcttcgaggacatcatccagacgctgcgccagttcccgcggccctgccgcctcaccttcgcgcggcttgcggaggaagactcgtcgggctcggacgaagagaacctgctcttcccatccaggcccctggcgccgatcacgcgacccaaggccacctcgtcttcgaccgacggaggcgaggaagcgacggacattctccgccccccgttcctcatgcgaccgcagacccgccccatgtcgcgctccagagcgggtgtaccccctcctactcggaaactgatcccaatctcgaaacgccagagcttccgcatcgacaagccgattcccgatggtaggtctcacgctggttccaatgcgtccaacgacggcagggctcactctggatctaccgcgtccaatggcggccgatcgcatgcgggttccaccgcctcgaacgacggccgaccgcactccggatcgaatgcagatgaccgcgggttctacaccgtcgtgtacagcggtggagcggtaggcctgacgctgcgcgactgcacgcaggacgacaagggcttgaccaagagcaatgacaagaccaaccgcacgaatggctacactgtggcaatccgaaccgtgacgaaccccaactccgcccccggcctggagaacgcgacgccggacgacctgctcatggccatcggccagaaggacctgcagcacatgtcgttcgaccaagttcgcgctgagctcggagcgatccagggaccgacccaacttctgttcaagaagcgcaagcgcgtcactgccagctcctcgggcgcttcgctggtcgacacgttgctgctcttcctcgtgtaaggaagaagcaaaggtgaacatccagccagccctacgaatcgtgtcgaatggcaagacacgatagattttgcacgtcttgtatgtacgtgacgatgtcaatgaaaatatgaaaccctggtttgaattgaataaatgggcttttgctcggagtgtgtggtgttttggtttccccagctattcctgcaccctaacggctcgaatctcttgatacgctgtgtattggatccgaattgcgatggccacaacgacgttcctctggcatgtgacgaggcatgcattgcggatacctgtacaaacctgaaaggcaacttggccttatcaagctcgactatagacatggctacatttcacaacttgaagttgccttgcgtcacgacaaccgcgtacatgtaacagcattgcactaagctcactcaggccaagctccaagtctctgctagcgtcctcgcctccgcagctgattcgctccccctgtgctctcgaatctctcgtttgggctaagaatgcctcgccaatgctggttgatggcttgtgtgactgcacaaggccaacctatttccagccctattagttacccgcctcccattggacaaaatccaaggcggaaaaacgaactcagatatacttagtaaaagtaagggggtcaaagactttgaccccctcaaagtgctcatatcaagctactcgacgacccccgcgcccttgctgcatgcccgagagctcctcttcgtcctcgtcctcctcctcgaccgcgccgcccatgcccagcaacgaagagagcgtcgcgctgcgcgcctcgggcccgagcagcagctcgctggcgtcgccgtcgcgcgcgcggctgctggcctccgccggcgtgggcagcggccccgccgcgcccgacgaggcccacgccgtgcgcctcaacgtgctcaacagcagcgtacaggaggcgcgcgatgcgcgcaactcgcgcctcatcatgtgggccatctcgctcgtgaacgtgccgcagatcgcggcggccgtggccatcctggcgctgcactggcagagcgagacgctgtgctaccgcatccaggtctgggtgctgctgcacacggtgcacctggcactcacgctgctgctcgagtggacgctctactacctcaatggcgcgcgcagcaacagcgccatccgcctgcgcgagcactacatggcgccgctgagccagctcaagtacgggctggacctggccggtctcttctggttcctcgtgggcaacatgtgggtcatcagcgacggcgcgcgctgcgacgacggctccgccatgtaccagttggcgctctggatgatcgtcatctcgtacgccaagatcttcctgccgtgtctgctgctgctggcgctgctgcccgtgctctgcttctgcctgccctgcgtcatccgactgctcagccggttgcaggaccccatgaggggcaagggagccaccaaggaggtgagctgcctcgtagtcattattattattgttacggttggagtaacttacaatgtattttattgttgttgcagattatcgaccggttagagaccaagacgtacagtgccaacatgttcccgcccgaggacgcgtgctgctgtatctgtctgaacgactacgagccgtcgcagagtctgagagtgttgccgtgcgagcaccatttccacaaagactgcgtggacgagtggctgctggtgaattccacgtgcccgacatgccgcaagtccatcttcgacccagcagggcaacccgagactgccactgcgactagcgaggaagacatgctacggcgcgtgtgatggcgaaagccgtttctacccgccaactccccaaggacaagtgatgcaacaatattttctttttatggtgttgatattccggtagccctcctcccaagattgattttagggaggctgaacgtgatgtctccgatttttttgcgtgctgaattacaagctatgaactaaacaactatacggttggtgacgctgaaaatacaacttctgggtcggcagcctccaccgttgccttgcaccgctgcagtaactctgtacgcagcacgccaattcggtgtcaatgagcaccccagtaccaaaatccgagttgaaaaccaaccttgcagattgcgtgtgctttcactgatgaagtttttcactccgatatcatcatcgtccgtggtgccaaactcgtgctcgctggcaagatcggcagccaaaggctcgtcatctgaggtacctgaggacttcccaaagtcatcagccgaaatttcttcaaggagtcgggtgagtgtgagtgcttcgccgttcagaatgaacaggtctggaaaagccttcgctatctttgattcggcactgctgtcgatgggattcccgctgaagtcgaggactcgaagacttggcaacttcaatggaaaaaaagttagtgagaggttttcgaggaaacgagtatcaacaatttgcacctttgtcgacaaagcagtaaaattgatgcttcggatctggttgttctgctcatttccgatagaaaaaaggtgggtattaaaatatggtacatcgacttcaggtgcgatcgttgagtcttaccgcaactgaaagctcttctagcagaggcaaacgtggcatgctgtctgttacataggtataaacaaacatgcaactattagcaaaagttatccaatattttacaagaaactccatttttcattgcctacgaaccgagtgaagtcagttggttgttggaaatgtgaagacagcgcagcagtggcaacgaaggtagaccttccaacgagcgcagctgcagttcaccatgtgagaccctgccgagacaattaccattttcacgaaagactaagcatacctcattatgggccaagctgagctccagcaggttcaaacaggactccagctgagccaggtaccggattcgcatcttcgagacgtccagcagcgccaccaaactcacatcgtagtggccgctacgctgcttgatgacgtccgcggtcagctccatggctctgcaggtgtcgacttttcactcgtttcggttccccgactatccatgacaaaaatactcgagcaagagagcccaatgagtcaggaccaagagcacaaagccacgggcgagcggggtgcaggccacctcgagctctctgcgtcgtagctccggatccagtcaacgccttgcagtaacttcaactagagctccggatgcttggaaacctcctgctctcggttaatggatgaagctgtggcgagccgtcggctgcggacgactcagctcgagggaacgtgttccgtaagcacgatcgcgagctctgttgtaatacacgagctggcactccaccacgcaggctcaaggatggagagaccccgccttacctaccatacccacttgaggccagcttcacagtaaaatcgtggacctttgtcgacagccgccgactcgactgcttctgcttctgcttggggcagcacgttggcttcacgctcggtttaacagcgatctgcgtacggtacggctagttcaagactggcatcggccgacacgcaaggttcgcttcgcttggtcgacttgagcgtagatcgccagaacgagtcaacttcaagcagggatgagcaacggctacgctggcctcgctctccatggctcggagctgctgcccgccgtcttgccaagacaccaagactcttggtgctggcagcaaattgctgaggattggcactggccgtttgacatttttgctggaggccttgcactcgccttcgttcgttgagctgctttggcgttttggccgcgatacgaggcgtattacgaccggcgacaggcagctacgagcgacagcagcagaaattctaacggcgagcagcaaagacaacgcaccagcagactcgttccaggcaacttcaaccaccaccctcgggaccgaacttcgactgagatgacagtacatcagccggcgccttatttgctgtaattgctagggagaagatactgcaccatcggcgctacttcagagctgagcttcagcgtcggggactcccggctcaaagggtctccctccatgcaaagtgcaaggatctcccgatagtcgacactagtcagctgtgcatttcaccatgccatgcagtgccgcggcaaattaaacacacgagatctctatggtttatcaccatgccgtcccgcactccgatatccatcgctgttgccatcaacttgacgctgggagggaggacggctctgatttccatccaaaccgagcttttcgctaaacgcgcgtgccatcgcctgacacgcaaggggctgacctggaaccgtttaacgacgagtctctcgtgcatcaaagctcccgtcgctcgccgccacgcagaaacggggccgctatatatcgcttcaacctgcgtccctgcacacaggagaccaccacgggcagctctgcagctcttactcgatcgatccacgccctccagagctctcattcctcaattggcggcgtcgcgcgcaccccggtctcctcttccttcctccacttttctccacactcttcgactgccagcgatgaccgatccgtccgtgcagcgcgtgacgcctcccgctaagaactgcggcggcaaggtccgcggcgtgctcgtcaagcactggacggtgcccgaaaagcaccgctccgagcagcaggacgcggccgaggagtacctgctgacggcctacctcttcggcaagtactggacgctgccgtggatcaaattcaaccgctggtacctcttctgcgcgagcttcatggtgcagttctgcatcggctcgctctactcgtggtcggtgctcaacaaccccattgacctgctcatctacaacgacaagaccaagggcatggccgtcaacgccttctacatcgccgtcggggtcttcggcacgtccacggccatcatgggcccgtggatcgagcgcaacggcccgcgcgccggtgtcgtcctcggcgccacctcgttcctcatcgggtgcgtcgtcagctgcatctcgctgcacgccaagtccatcgtggggctgtacgtgggctacggactcttctgcggcttcggcagcggtctctgctacatctctccagtctccgcgctccagaagtggttcccggactaccgcggcgctgctgcaggcttcgctgtgggcggctacggtgccggctccgtggtgtggggcaaggcgtacctgcctatcatcgaggccaccagcgtgcccgacctgttcatcgtcgtggggtgcgtcttcaccttcatcctgctctgctgcgccgtgtgtctgcgcacgccgcacgccacgttccacgtggccgggctcaacatgcacggagaggcggtgcgcgaggcggaggagtcgttcgcgcgcggcgagaagatcagcgtcatgtccgcgcacgagtacgagtccatcatgacgcccacggccaaggagatggaggcgctcgtggacccgagcgccgacccgcacgacaccaactcgcaggtcaagaagatgacgctgatccaggccatcacgtcgcccgacttcatcttcctctacatcatgttcttcggcaaccagctctacggcctcatcgtgctgtccaagctctccaccatgtgcacgacgctcttcggcaagacggccgaccagggcgcggacatcgtgtccatcaacggcgccttcaactgcgtggggcgcctcctgttcccgctcatctcggatgtgatcgtgcgcaaattcaacgtcgagcacgccttcgcgcgcaagtgcctcttctactacgggctggtctcgcagatcacgatcatcgccatcttccccacgctcatccgcaacgagagctacacggccttcgtggtgctcgtcttcctgctcacgctctcgtacggcggcggcttcggcacgatcccgtgcttcctcaccgacatgttcggcgccttcaacatcggcgccatgcacggcttcatcctcacggcctggtcgctgggcggcgtggccggcggcctgagcttcaacgccaagtacaacgcggccatcaaggacggcacgacgcccgtggacgcgtacgtggacggcatctacaagatcctgatcgtcgtgtgcgtcacgggcatcttcatcttcatggtgcgcaccaacccgcgcgaccgcttcgagaagggctaccactacagcctcttcggcaagcgcgtcatcagcatcaagcccaaggacacggccgcgagcaaggaggacctgctgcagagcgaggcctaaagagggagaagaaggaggagaagactattcgtactatgctagtatacagtatgtagctgactaaagcttcgcagtgaattgaacgatttgtatgaacgaaagcgccctctgaaggtgtttttgttgaagttgttggcggtctagcaagatgcagtctctcttgtcccggtgttggcccttcgctcgctcgacgttgacatagcttcaaggcgcagccatgtgctttcgactgacgggaacgggaacaccaccgcaacgatggcccacaaacaactatgtacgactcatgcttgatactgtacatactgtacccccatcttgtcgacggctgtggattgtgtgcgtgtgcgtgcattgcatccacgtgccaacgatggcggtgaaggtgggcgaagtggtgctgcaaattgcagcctgcaatgcgaagatcgcatcgctttgccatgcttgcggtggtgcagcgcggtgcgacagtgttaaacgggcgaggatgccgctcagcaccttgcgtttccgcgtacgagcactttcgttgacagctttgagtcacaacagggacgcgttaaaagagcacagtaggtgatcattatgaagtgatcgccatggtccatccatgcaggataatatgttgatctccacacgacggaggctctgcaagccctctacgtttcctgcgtccatcgccatagcagtctggagaccccggcgtgtgcttcgccttgtcgctcggggcggtggcaccgtgctgaccgtcggcccagagagagcaaaacttgctgggctcgatccgacgaggaggatactgtcgcggtaggtgttgaagtggcacgagtctgatattggcagcgacatcgcccgacgcgcaaggcgcgcgcaatggtcgtgttgaccggtccatcccctcacagtcatcgtagtcgctgcggtttaacccttttaactggacaggcagcagatgaagagtactgtagctgcgagtcgaagcctaccacagtgagcggcgccgttctcccatcgaagttgagtactaaacgaaccagataccaagcaataacgcgagcacactcgtgccttatccggggcagcatgttgaccgatgtcggcactcgcttcccggtgtcgacatccacgcggcttcaactcgcattaatctgcgcgttaccgcgtctgatgtccgatgtctgattaatcaagcctccccaagagaggtgcaaccacacacaaatacactgcacttgcgaatccgatacgatcgacttcgctacgctatgtgttttcaatagagttatagcaccgccgccatcccgagaaacgcaaataagtcgcttcggtcgcgttgaagttggatccacgttgaagtcaccacgaaaaaagcccaaaaccaatgactgcggaacccaaccaagaagagatcgctatagcctacggccgctcaccaccatgagctccaaacgaagtcttcgccccgccatcctccgctcactcctcaattggctcgctgcccctcaagtcgcccccaagaagcctctaacctcgccaagctctcgccatgggcgtggaagaccccgcaactgtcgactcgtcgtccaagaagacgtgcctgcgggccacgcaggacgcgatcgccggccactggacggtcccacccaagcaccgcacggccgagcaggacgcggccgaggtgtggctcttcacctgctacctcggccgcgaccggtatttctcgctgccgtggctgcgcttcacgcggtggtacctcttcttcgccagcttcctggtgcagttctgcatcggctcgctctactcgtggtccgtcttcaacaagcccatcgacctgcacgtgtacgacgacaacaaggccggccgggccgtcaactcgttctacatcgccgtgggggtcttcggcacgacaacagccatcatgggaccatggatcgagcgtcatggcccgcgcgccggcgtcatgctcggcacgtcgtcgttcctcatcggcaacatcatcgtggccatcggcgtgcactacaaggccatcgccgccatctacatcggctacggcatcttctgcggcttcggcatggggctctgctacatttctcccgtgtcggcgctgcagaagtggttccctgactaccgcgggactgctgcgggctttgcagtgggtggctacggagctggatccgtcgtgtgggccaaggtctacctgccctgcattgatgcagtggggctctcgtccaccttcctcttgattggctgcgtcatggccttcgccatgtacgtgtgcgccatcgtgctgcgctctccgcaccacgagttcgtcgtcagcggcttgaacatccacggcgaagcagtcgaagaggtcgacgagctcagtcaccgcggcgagaagatcagcgtgctgtccgcgcacgagtacgagtccatcacgacgccgacggcccaggacgtccaggacattgtggagcccaccacggccacgaacacgctggtgcgcaagctcacgctcatcgacgccatcaagacgcccgactttttgtgcatgtacatcatgttcttcggcaaccagctctacggcctcatcgtgctgtccaagctctccaacatgtgcgccgacatcttcaacaagtcggacggccaggcctccgacatcgtgtcgatcaacggcgtgttcaactgctgcggccgcttgatgttcccgctgctgtccgatatcatcgtgcgcaagttcaacgtcgaacacgccttcgcgcgcaagtgcctgtacttctacgcgctggcgtcgcaggccgtggtcctcggcacgatccccatcctgatgcgcaacaacaactattcggcgttcgtggccgaggtgttcatcctcactgcgagctatggcggcgggttcggcacaatcccggcgttcctgaccgacatgttcggcgcgtttaacattggggccatgcacggtttgatcctgactgcgtggtcgattggtggcgtggtggggggcatcacgttcaaccacacgtacggcaaccagatcgccgacggctgggagatccacgaggcgtacatctacacggtgcaccgcatcttcatcatcgtgctggtgggcttcgtggtgctcttcttcgtgcgcacgaacgccgccgaccgcttcgagccgggataccacctcagcatcttcggcagacgcgtcgtcagcatcaagggcaagcaggaacccaagaaggaggaaccactgctggagacggcgtagtcgagcacgaatgtgcaggcgatggagtggcgagaaggtattcatagctgtaaaaggtcaattcatgttgtacttcatcccaaatacatttaccggaccccggaccaacggaccagcgattcaacggctccgagttgaagaattactccaataccgcctggttacaagtaaacaaatgcgcgctgatccattgttgaagctgttgaagcgttgccatctttggccagctgaagatcccaccggaacggacgccaacttccttgtcactgcacttgtactataccatatcgttttccacaccattttgggaaagctgtaacacaagataagaacgcgttttgacgctctctgcgttcccgttcccaatcgacagctcccatctgtaagaataaacaagcacccttagatctcttctatccacaaggaccagttattcggtaccccttcaagtaaagcctcgccgctctcattcctcaatcggcctgctcaaagacaacgcagcacgtcgattgctggtctcccggttctccgagcgcaatgcccacggtggcgatggaacacaaaacgtgcctgcaattggtgctagcgaagatcgccagccactggaccgtatcgagaaaaacctgttcaccggagcagtacgacgcagaggagtggctgttcacgttctacctgggcaaggaccggtactactcagcgcagtgcttgcggttctctcggtggtacctcttcttcgcgagtttcctggtgcagttctgtatcgggtcgctctactcctggtcggtgttcaaccgacctatcgacgagtacgtgttcagtgacccgaaagccggctatgccgtcaacgccttctacattgcagtgggcgtctttggtacgacgacggccatcatgggtccgtggattgaacgcaacggcccgaggtacggcgtggtgctaggcacgacctcgtttctcctgggtcatgtgatcgtggcaatcggtgtggcgcacaagacgatcgcagcggtgtacgtcggctacgggttcttctgcgggttcggtatggggctgtgctacatcgccccagtgtccgctctacagaaatggttccccgactaccgcggcgctgctgcgggcttcgctgttgcggggtatggagctggtgctgtggcgtgggccaaagtctaccggccgtgtattgaggcggtgggggtgtcctcgaccttcttggttgttggctgcgcgatggccggcaccatgtacttgtgcgccatcgtcctgcgcacgccgcacctcgagttcactgttggtggactgaatattcatggtgaaatggtcgacgaggccgagctgatgacggagagcgaaggccgggccacgcccaagaaccagtacgagtctgcgacgcccgacaacgacatcgacttcattatcagcaccaacgcgcaggtgcgcaagctgtcgctgatcgacgccatcaagtcgcccgacttcctgtgtatgtacctcatgttcttcgccaaccagatctacggcttggttgtgctctccaagctgtcgaacatgtgcaccgacatcttcggacgctcgggcgacgaggcggccaacatcgtgtccatcaacggcgtgttcaactgcttcgggcggctcttcttctcgctctcgtccgacctggtggcccgcaatttcaacatcgagcacgcgttcgcaagaaagtgtgtgttctacacgacgctggtgctgcaggtggccatcgtgggcactacgcccatgctgattcgcaacaaccagtacacgaccttcgtgattgagatcttcgtgctgactgcgagctacggcggcggattcgggaccatcccggcgttcttgaccgacatgtttggtgcatttaacattggagccatgcacggtctcatcctgacagcgtggtccattggcggcgtcgtgggaggcatcacattcaacaatacgtacagcagacagatcgaagcgggggtgtccatcagcgacgcgtacatctcgacggtgaacgacatcttcgttctcatcctggccggcctggtagtgttgcttttcgtgcggacaaatcccatggaccgctttgagcctggctaccacttcagcatctttggccgacgagttatcagcatcggaggcaaggaggaacctccgaagaaagcggaccccactgctgcagatcatctaaggcgtaatatatagttttattattgcttggcattgctggtttgctcccacttcttgatgtcattgatttcgccagtccaaataacatgaatcatcttttttcatgatattcgagcaaatgtcaggtctattctagatctaccacgaaggcaaaaaatcgacaatgcatggataaccaaggcccgaggcttgcatgagccttctctcaacaccagcagcgctagatagcccacccaccactcctcaatttacttcgagcaccacaagtgacaaccccctgacgcgtccgatgtccttcgctcgcttcgtcatcggtctattactggcatctctcgccgttgtcaacggtgccgccatcttcccgaactgcagcgccgctcaactcgacacgatcaaaaacatcgcccaagccacccctctggccaactacctcggcatctgcaacgtcgtgggcaactacgagatttacccgttcaagacgcctcccaacggggcactccaagattccgtctgcagtcacctgttctgccgcaccgcccttaaagtgttctactggacctcgaacctgcccaaatgctacctcgatatcgacggagactactcgtggacccccaacgcgcactttcagaggatctgcccgaagatctggagtgcgtgaaaaatattcttcagaatacccccccccaaaatgtagtggtgtgatggaaaaataaatgtaattgtcgttctctaattctcctgcttaactacagcctagccaagcctcgacattcggatcacaagcgtccccaacgccacgctggatatgtagtttacgcatcgcaatatacccggacgtcgtttcgcattggatgaccatcatcctggtgttaaagcagattccttgcttgccattgagggtgcattccttgtacttcactccattgcagagctcatccgtcgtatatttactgggggccattgcttctcggttgagtggaggcgcggaggggcagattgagcttccgaacgagtcgagtaatagtttatcctcagctgagattcgttcatccgtgcaggtgagagggtacttttcacctgaaatgggcaaacactgcgactcggtcatgttgcacgtcccagtaatgaagccgttgcagcagacagccattctcgctcggatcaccaaggatttcaagctcgttaggggggccagagaaggtaaagtgggggctcgtagcgcgtgaacgatgtcgaggtcgtcgagtttggacagcccttcgaagcttggcaactccttgagcgagtccaagaccgctagagtcagatagcgtaagcgctttagagatgcgagcgatgggatcttctcaacgttggggattccaccgaagtggaggaaggtgaggtgaggcatgttgttaaagatgccgtcggctatggttgtgagtcgtctgcttgtgtagtcgccctcgaggtggctatagcattcatggatcaatgtagttggtaaaacattcttcactactatgacacactttgaaatacgtacaagtattcgagatgagtgaactcggcaagccaagctggaagagctgtagttttggtgtagacgaggattaattgctcgatgttgcggcaattcttcaactcttctggtaattcagggaccgcacgattaataatttggacgattcgtagttctccggcgatggcaagttctgcaagattcgacgtggtgtctggtgggtcgatccaatcggaatattttgtgggcgaagtctcgcggtctacgaacacgaggcaggtgcagtgcttctcattgaaattccactggtagctggggatgacgcacttctcgtacttgctgcacaactccacagtggactgcacagagccgactgaatagataaacatgcagacacctgcaacgaagaagataagcgatagaaaaagcttgggaacaaaatgcttcccgaatttgggcttcgacagcgactcggaaagctttttcgtgattgcggctttgatgctccccgtgcgtgattcacgcgcgaccggtttaatcagagccttccgtttccgttcgatttgtcgctcgtgatggttgtgattcaacgtcatgatgatcttccgccacttgtatatcgatagaacgttcagagcagacttgtagaagagcgcagtgcccgacgagaactgcaagtagtggaacgcgctgcaaaagctcgaaatttgcgacggatcaccgaagatgcgggcgacgatatcaaaagacccaggggtgatactttccatacgagtgagaaactctgcacgatcgaacttgaaggtgtagatgaagtagatcagaaccacgagaggtgcaaacactgcaaagaaaaggtcaaagctgcacaacatcgtatcaagttagaagatattgcgtcaccactacttttagtaccaacgtacttacgtgtagtagaggcgagcaatgatcaaatctggatcggacacgtagcgctggcttcgatagcaagttacgagccagttgcaaagcaacaggacggagtagtagtagatgatcgcagtcggaaatccctttcgaaggtacgtatagagtgtgagcgtctggaatatgagcttcgggagatccaaagctgctgtctgtcccccattttaagcaataattagtgaattactctccactgataaagaattacgatcaaacttacgaaataatgctcccgaatatcatgcggcaacgcgtaaatccagactcgcaggcgttggagcttcgttcccttcgcttcgttcgtcgcagttgccgcgtcgttgtctgggtcctcattcttagggcgtggcttatcttgcgagtgtttcacctcgtcgggttggccaacacgataatagaagatcatgattactgccaacgctgtataaccaatcccaaatatcgacagcagcacgatggaggagacaaccagtgaggtatcttgctgaggcagcagccagaactccccgttgtcgaactgtgtcgtgttcataatggtattcgccacagtagtgccatgaatctggatcgcggctagaatgaacgtccaggcggcggatacgataaagacgaggatcatcggcacaccaagtaggccgaaaacgtcgtagaacgtggccacctcagtcgctacggagctaaccacagcgtgacccgggaaccgctcggtccaggagcctctgggagattttgattcgaccggtatagcttgcgggggcaggatactttcggtgttcagaccaagggtggagtgttgatctggggccttgactttgcctgtatgccccacatcatccgtcttggacaccagagctgaaaccgggtctgccattcgagcgcttacagagacgccagagtcaacgcttggaggcgggctttcagtctcttcccgcggcgttgccgttgtaatcgctgaagtagcacaactctaggaataaaatagctacatagtacttcgaaaaacatatatagcgtgaaaccactgtagtggatctggtctcggggtgagtttcgaaggaaaaacgcattttttttaaaaaatgtttcatgctctcagccccagcaaagccaaagtagtcgggaacaacgtgccgccgctttttttattgggaacagtcgttatttgttttcatatgggcaagaaggcgtccgcagcactcgttgctgtgcgggacgccatcgccctgaggaagttccctcctgaattgcagcttcccgagaagaaaaaggacttccttttctcctcatggcacggccaccctacgctcgcctgggccccggagtgccttcgcactagccgcgttccaaaatgcgttgttgaggggtgtctgtgtgagccaaaagtgaaggagtatttgcagcggtacacacacgacgtcgatcacaagactgttttgtattatgcaaggtattgctgtacagggcctcatgcaacacgcacattttcaactatcgacgatgagtatctagcatcatcaccagaactcttgctaccattcccttaccttctaacctatcaaacgggtgtatcacgcgagctgtctaaccttgtttatgatagcatgctaacgacaagaggcatatctggggcaagcagcagcgtcacccgttgtcgtcagagacgctattatgctctcttatctgttgcaggtgtcgaggcggagaagcgaaggcaaaaagaagcaaactattcgcctcctatgctagtgtcattggagcaatacatggaagcgaacgcatgtcttgatgatgaggctcttcaaaagatatggctgacccagactgaaatatgctctcgtttgcttgaagcccacatgacacagtgcaaaatcaagcgagtgattcgtctagataattcgcaaaagttttgcagcaaactcaaagtatttggtgctcaaggtaagaaagatcaatcacgcgaggtacgtatgctactacttgcccaaaatgaaatcggtcaaattgttgctcgtggcctgacgcactcagaaaatcacgctgaaactgcggcaattctaaacctgtggccgcgcaattagcgtcaaaaccacttgaatctcgcttctgtataaccgaccacgccaacggcacacgaagcctcattgacaaggtcttcaacggtgcattggtagtcaaacaagaccctttccacgtcatccaaaggttcacagagaaggtaaaggatcacgtcatgcggggatggctagcgactgagctgtcctctgctatttacacggccgaccacaaaatacgagagcccgaagaaatggctacactgttttcaaccgctctgggcaagattccagcttcaagcctcaatgtcaaagagcctgagtggcaaggatgcatagctagcaacctgaaccagatccgagtaggagatttatttgttggcgaggctgaatacgtcgagaatggcggcagggtaccagtactttcgatcagctcgaagcagttcattccaaactccgcaagctcttagatcgtattgtatcgtacgaaacgggccttcgtatactcgacatcttcctcttgcaggtaattgcatgcagatcagattctactatatgcgtatctaatgctgtggtgtctagcacaatttgaaagtaggggccaagttcggaagaaatcctgaattttttgagtttgacttcttgacgatgtgccttgctgctgttttgggtcgcgagcaatttcctgcctctcctcagctggagttcatgtacgagctaattacgcgccaaggttccagtttgtgtagtccgtcgtatcgtgctggagtatccagcaattacgagaacagaccatgggaaagactgagtgatctaatccgcctgcgaactgatagagccgaagggaggatgctagatcagcatgctccgactacagatatccggcggcttctcgtgcgctcacgtgtgaatcgaaagcagacctctcgagctgagtttgtaacatttcttcgtttggagccagaatacgaatccacaaatgaattctcctcacacgagttctccttgctgaaggagattcgaggggagcaattggcgtcgagtcaaccgtggaatacgtgcgaggtggtcgcgactataatatttaactgtgctgtcgaccagatcgacaatcccgcgctcgatcttcgaaagcgaagttttagatcaatctctcgtcgcctgtcggccgttgatgagcagatagcacgaagccccgcgccaaaagcaagtacagccatgatccctatcaccgtgaaagctgttgatgaaagcacctcgtccggagatgaacgggtgttgcaggaggagctattcacgatgctacgctactcgtctggtattaagaaggtgaagcaagtgtactacaatgtgtaccaattggcgtcgtgtgtttgtccggaaattagaccgaagtcgacggcctggttgaaaaagcgttgggagtcactaggtaaacgacagttgcgccgaaatcgtgataatgaaggtcaagagccaaccgaagtggcgagtgcaccttcacctcgtctacaagtaggcctgaagttgtcgaacagcgaggcgagtggtaccgcgttgcgcgagcctgtacttctcactgccaacgcgcaattggctccagagactagttgtaaaagcgctgtcacgaacggtgaaacgattgcgtctgtagtcgctgcagtaccagggccccctcgtgtgctgcccgaagtcatggatgctgggaccaaacagcacctgtgaagttatgcggattcgtttgaaaaaaatacacctggaaaatggaggatgatcttcgaggaatttcagcgtatcaaacctgggtcggcactatccatcaatgctctccgcggtcgccttgaaaatcggtccaaaaagcggaaggtgtcaccagcagctcagtccgatgcagctgctcccaattactccgaagaaccctctgcgcgcaagaagatgacaatccagacacagccaaacgcaccaaaagactcccgcagcagtgatcagcacaggggcgacgtccctgcgaagcactcaaaacagtcagcgtgtaagagctgctacgagttgagacgaagatgcggtccatcaggcaacaacaagtactgtaagtacaaagctcagagtgggaaatcaatcagtgcatattttacgtcagcttaggaaggctctacatgaccaacaacacagaacaaatgaatacaactgatcaattagtccgcttagaactattagactacggtagtaaatatcacagtaccttaagtgcagcgagcaaacctcgacgtcagggcgtcaggagccgagcgcgcacgtctggagctgcttggtgtacgtgttgaagtcctcgtctgagtcgaggtacaacacgggacagtgcttgcgattcagcattagccgcagctagcgacggcactcacagtcgccgtcgttaggctggaggcgccctgtagcgatacttccaaccagtttttgctatccatcgttatcttggccatgcgcctacatcatataatagtacagtaacacacgtcatgatgccgcagaataaagcgatgcaacagtgagcttctcaacttcaaagacttgctaccctcggcccgccttcttcctcgtcgcgacaagcgtcttctccttagcttgcatgcgtacgcacgcgttctgtggcttagtagcgcgccgcctctcgtattgtggggcatgtcggcgagtccgccacttcagatatgcggatagatgtcatgaacctccccgcttaggttcatttagttaaactattattagagggtgtgtcactttaggacaagtcgggacccacgggacattatgaaggacagctggtagatggtcgccgatgctggcatttggtgacgattggtcgcgggacaatcccgggaatagcggtcaagccccccccccaacagcggtcaagccaacgttctcttcctcgccctcttgcgcttgctgccgcttgctccttgcgtctcctccgcagagtgccagtactcctccaatacttcctcatcgcgcctccgtctccatggctgccttcgctcgcttggatctcctcaggtcttgagttgtgctcagatatagaagctctttaaggttaacaccgctgagataaaatgcggtgcgggtactcgtaccaatcgacccgctgagaactatcgtgcactcgaagttgggtcccagcatcccgctattcgtccagttttgcgagccatggataagaatctagacaacccacattttcgtaaatgtaaaaccaaagcagtcgcagcattattatatataaagacaaaccggccgtcgaagatggcagtcttcggctccagcccaaattaggtccgcaacacactcgatacctttcccccgagcctggctaaggtcaatcatgagcagcacagtgacacctgctgccaacgcgtcgaggaggttttggttgatcctcagcaagaacatcccgatcttgatctctttgcgctctgggtctgtgatgtcaccgagcaaccaccaatcttggccgcttcagtcagtgtgactttttcacacttggcctagccctcgcgatggtaggcggtcatcgcggcgcgctggatcatggggattctgtgtatcgtcggctttggtttcttctccttccggcctttgccaggtgcctggtcggcacgagggcgggtgtcgtggttggtagttatcatcaggcgttggtagttgggcatctgctgaagttggctgctgctcggtgggcgcaacgggaggcgaggtggctggctggcgctcagcgggcgtggcgacagtcgatccttgcgcgagttggtactcggtgaccgtaccggtggggctggtgttgaagtcgggcaagtgctcagccgtcggcatgcaggccaagcgcggccggatgtgcctgcacgcccccgcgctcgcgaacactgcaagaacggctttactggccatcccgaacatcttcgggggaaccgcttgggcgtggggacactccgttgccactcgtggcaagcgggatggagatggcgggtggagcttgcggtgttgaaggaggtcgagcttcgactgaactcgggctgggaggggtgaagcgcggggaagtgggttggagcgccgtcgcgagggccctgcggccagcgtcgccgagacgggatcgaggggaggatggcgcatgttggggtgctggcattgctcccctgacgggggcggttggcaaatgtcgtcaccctagaccatgaatctgggagcatttggagcaaatgtcttactcgaacgcattacatgcaaccaaaagccaagcttccaccactgtgacgtaactagctgttgtttacagtgcccattagtgtataaaatatagttttttttcagtcagctcccaatagcaaatgcatgcttctttttattaatgtagttgtgctctttgagctgagaagaatgtgattcctcgaacgcattacgtgcaaccaagccaagcttccaccgctgggtcacacgcgtcaccaaccccacgttttatctgcagcctgcgcatattcatatagtccgtcgaggtgctgcactggatgaccatcatcctagcgttgtagcacattccttccacgccattaagctcacacttcttgtacttgacgccgccacagagttcatcggtcgaatatttagtcggtccagctttcgtcatgtcgacggggggtccgggagggcagataacgctcgtgatctttcccagtttctccttgtcagccgtcgaaatgcgctcgtcgctgcaggtcagagggtacttctctccaacaatcggcagacactgagactcggtcatgttgcacgtgccagtgaagtagccattgcagcacatggcactccggctattcaccactatggatctcaggctgtctaaaggttcgagcgaaggcagccttgaagcacgaggaatatgagcgatgatgatgtcaccaagctccgacagaccttcgaagctcggtatctcaatcaaagagtccatgaccgccagtgccaagtagcgaagattcttcagtgaagagaaggacggcaatttctccaagtttgggtggacccccaagtggatgaatgtgagatgtgacattgtgtcgaatatgccgtcggccaccgaatttagtcgtcgatcagtataatctccctcaacgtggctgcatacaaataaataaccgcgttagtatcttgctattagattcatctgaggcaaacaaaaatacttacaggtattctaagtgggagaactccgacatccattccggcaaatgctgagttttagtgtaagccaagatcagctgctccatgtaacgacacgccttgagctcttccggaagttctggaacagcacgattgataatttggacgatgcggagctctccagccacagccagctctgccagtttagacgtcgtgtcctcgggattaatccactcttcataatttttcggggatatttgtcggtccgcaaacacgaggcaagtgcagtgctgctcgccaaaattccactggtagctcgcaagcacgcacttgtcaaacttactacacaattctgtagtggagacaacggatccgaccgagtagacgaagttggaaattccagcaactaaaaagacgagcgacagcagcaactttggcacgaaatgcttcccaaacttcggcttcgtcagcgtctccgataatcttttggtaattgctgcagtgatactcccagaacgagactcacgcgtggctggtttaatggaagccttccgcttccgttcagcttgtcgctcgtggtagttgtggatgagagtcttgatgatcttgtgccacttgtacagcgataaaagattaagtgccgacttgtaaaagagtgacgatcccgacgagaactgcaagtagtggaatgcactgcagaaactcgaaatctgcgacggatctccgaatatccgagcgatatcatcaaacgagccggggctgagagtctcgattcttgtcatgaattcatctcggtcgaagctgaacgagttgatgtagtagataagcaccaccaagggcgcaaacactgcaaagaataagtcaaagctacaaaatgagccttgagtgttagtttacagtgtacacggttaaaacctaacatttttaggtgccaacgtacgtgtagtagagtcgcgcgatgatgagatctgggtcggcaacgtaacgctgacttcgatagcaagccacaagccagttgcaaaccagcaagacggagtaatagtaaatgatcggagtcggaaagcctttcttgaggtaagtatacaacgtgagggtctgaaacacaagcttgggcatgtccaaagcagcggtctagagcaacaaggaatgcaacaacaatcagcgttagagtacacggccacctcagcttactcgttcggatgaaacgagggttctcacgaagtagtgctctcgaatgtcggtcggcagctcgcgaagccacttgatgactcgttgaattacgtttttctgtccattctgcttcaacaccacttcagtcgtcgcaacctcaagagattcggtagttttggtcttggcagggccgttgagactcgccaacgagagatcatcatcctctttgggggcgcccgctcggtaaaagaagatgatcgtcaccgccaacgccgtgtagccaataccaaagcacgcgagcaggaccacggaagccacgacaattgaagtgtcaggcttcggcagcagccagaactcgccgtcatcgaactccgtcgtgttcataatagtgttcgcgatcgagtcggcgtggacctggatcgcggcgagcatgaacgtccacgcagctgacacgacgaacatgatgatcatcggaactccgaggatgccgaagacgtcgtagaaagttgcaacttctgaggccacgatgttcacgacagtcggtccgtcctcgttgagtgaccccttccacgaggctttcggcgtcaacgacttgagcattgacggtcttggagctcggatgcgttcgggtttcgcagcttcgtgtccttggagcttactcgaacctccgacgtcgtcggtatgggacacgaggaggtccatatccgcagctctcaccgagtctcctccagagtttgggggatgttcacccccggtcgagggcgctggcatcgcgaccaccgggccttttcactgaagaaggcttcggttaaatcaggaccgagctagcgtctgttgactcgtgacgaaacccaccgtggcgcctaaggtttggtaactgacctaaaacaaaacgaggggtgataggacatctacatagaatattaaaagaagctttttatgcatgccctcttaacgaaatgtactcgatttgattctatggtctaaccttagttgttaggacagccaagccaggcttccacctcggggtcgcattccttgcccaccccgcgctcgatctgaagctttcgcatggcaatgtagttgggcgtagtctcgcagttgatgaccatcatacgcgagttgaaacacattccctgcttcccgttgaaggaacattccttatacaggaccccaccgcagagtacatcggttgaatacttgcatggcgccgcctgctccatgtcctgaggcattgaaggcgggcagatcgtgtctccaaacgaatccagcttcgctttatcttccgctgaaatccgttcacacgagtgggtggctttcatttgcaattgggaggcactggggctccgtcatgttgcacgttcccgatatgtagccactgcaacacacagcactacgtggtaagatcaccatctgcgtcaaacgcttcagtggcgccaatgacggcaaagtgggggcgctcgggaggtggatgaggttcaagtcgctgacggaagaaagaccttcaaagctcgggatctcgatgaacgagctgagaactgcgagggtcaagtaccgcacattcttgagcgaagccattgacggtagagtcttcagagcaggtaaagtccccaaatgcaagaaggaaaggtgctccagatggttgaacatgccgtcggggattgtttggagccttctatccgtgaagtcaccttcgacatggctaggacaatgagccacacacagagagtattagcgaattaattacaaatattttgccataaaaaatgaagatacttacaagtagtccaggctcctgaactcggacagccactccgggaggtggatcgttttggtgtaaagtagaatcagctgctccagtcggtggcatctcgtcagttcttccggtagatcggggacagcacgattaatgatctgaacaatgcgcagctctcccgccatagccaactctgcgagattagctgtggtgtcatttggactagtccattccgcatatgtcgttggtgtcgtctcccggtcggcgaataccaagcacgtacagtgcttttctccgaaattccaccagtaactatacagagcgcacttgtcatatttgctgcacaattctcgagtcgaatgcacagacccaatcgagtagacaaagttgtgcactccagcgccgaagaaaatcaatgagataaagaatttcgggacaaaatgtttcccaaatttcggcgttgaaatcgacgatgagagttttttcgtgatcgtcgccttgacacttacggggagtggtgaactgagcttttttggccctatcagcgccttgcgctttcgctccagttgcctctcgtggtggttgtggatgagcgtcaggatcattttgcgccacttatagagcgagaggaggttgagtgcagacttgtagaatagcgaggtgccagatgagaactgcaagtagtgaaatgcgttgcagaagctcgagatttgagcgggatcgccaaaaatgcgggccacattgtcaaatgtacgaggactggggtctccactctagtgagaaattcctcgcggtcaaacttgaaagtgtagacagtagatcagaaccacgagaggcgcaaacactgcaaagaaaagatcgaatctacaataacagtggttagttgttttactgtaatactgtaatacagtgatatgtgatgaatacagacactcacgtgtaatagaggcgagcgatgattaagttggggtccacaacgtagtgctggcccctgtagctagcggcaaaccagttacaaagcaacataatggagtagtaatgaatggtggggtttggaaatccctaccgaaggtacgtgtacagtgtgatggtctggaaaacaagtttcaggaggtccaatgcagcggtctgtaaagtcacacatcaaagtaattagtagccattttccacgcgaaaatccaaccacggtcacttacgaagtagtgctcgcagacgtcttcgggcaatccgcgcgcccacaagatcatattctggacaaaattctgtttcgttattttttgctgaatcgccgcttgcatgctcgagtaccgagatgaattgttcattcccggatcggagtcaatacttgtctcggcgtctttcagcgcgccagctcggtagaaaaagacgatcatgactgccaacgccgtgtagccaactccgaaaagcgtaaacagaatcgccgaggccacgacgagtggggtctcgggcttcggcagcagccagaactcgccgttgtcgaactccgtcgtgttcatcacagcgttcgctatcgtcgcagcgtggacctgaatagcgactagcatgaacgtccacgcagccgacacgaggaacatgatgaccatgggtaccccgaggatgccgaagacgtcatggaacgtggcaacttcagtgactacaaagttgacaacggacggtctagagtctgttgacggttctcgagacgctctcggcttgaggtggggaggtcttgacgagcgttttttctcgggacgacatgacgtgagtcgtgggtctttttcctgaatttcgtcggtgatcccatcggtttgggaaacgagcgatggaatcacgtcttgtgcaccaccaccagcagcagcagcagcagcagcggtggtgttcatggggctggactctggacttccatcgactgtacgctcgtctacctgagaaggcatattgagatgtggtagactggcgagaatagctaaacaagtccggatctgctgaggtctctattttcgccatttccgtcacgttcctgttcgtcgagctaaacatgttggagtgagcggtcaacgagcgacacaggagatacaacgagctaaagggactctgtaagggttagatggtgctacgggtacatgtaggtaggaatactgaaggggcagcggatctgagcttacctgcaacccccatacttatcgatgccacccaccatcaattgaacattgctcgtttttgtttaatagtgaagtagttctgaggtacaagtcagtgaatatttttcacctaatggacttgtatgtgtgaattatttatacaatcgcttcagatgcgaattactacgagtgcaatcttcctcagagattccaaagctttaaggaggataaatcgcgtcgaccccgtgccaaagttagcatggaaggaacatcttcgcgtgcaacaaggccccttaatttccctctgatcgagcctttcaattggtagattacagcagtatttcagagaaaattatagttctccgctagcgtgaaaagatatgcttaagtgcgcgtgttgcttcataactattcaccacgggatattgcatttcatttcaatgaaatgtataatagcaggttagttaaaatatgacgaaacgatatgtgtcaagggctggtacagcctagccaggcttctacgtccggatcacaggcttctccgactccacgctggatctggagcttgcgcatagcgatatagctcgctgtagtctcgcagttgatgaccatcatacgcgtgttgtagcatatgccctcatatccattcaacgtgcactgtttgtacttgacgcctccacagagttcatccgtcgagtacttgcttggcgctgtcgattctcgatcgatcgggattgaagcgggacagatagtacggctgaacaatgcaagctcagctttatcctcagccgaaatgcgtgcgtctgtgcacgagagtgggtgatgctcaccgacgatcggcaaacactgggactccgtcatattgcatgagccagtaatgaacccattgcagcatactgcgcttctggcccgaatcacgatatttttgatgctgctcaagggagccaaggacggtaaaacctgcacacttgggaggttgatgatgttcaggtcgctgagtgaagtaagcccctcaaaactagggagctctgtgagggagtcgagaaccgccagcgtcaagtagcgtagcttgtgtagagacgatagcgatgggagtgcaaccacgtccggtaacgttcccacgtgcaagaacgcgaggtggtccatttcatcgaacactccgtctgcaatggataaaagccgtctactcgtaaagtcgccttcgatatgactgtcacattgaagtcgcattagatatgaggttagttgtgagttaccatattgccaaatatcgcaatacttacaaatattccagactggaaaattccgagacccattctgggatatgaagcgtcttggtgtacgctagaatgagctgctccattttatggcatcgcctgagttcttccggtagctctggtaccgctcgattaatgatctgaataatgcgtagctctcctgccattgccagctctgcaaggtgagacgtgatatccttggggtcggtccactccgcgaatgtcgccggcgaagtcacccggtcggcaaataccaggcatgtgcaatctttttcaccgaagttccaatagtaactatagagagcgcactggtcatacttgctgcatagcgctgttgtggactgcacggatccgatcgagtacacaaagttgtgcactccagcagcgaagaaaacaaacgagaggaagagcttcggagcggcgtgcttccccatcttcggcgttgacgagagtgtccgggtgatgacagctttaatgatcccagggcgggataatttcggtttggttggttcaaccaacgcccggcgtttccgctcgagttgtctctcctggtggttgtggatgagagtcagcacgattttccgccacttgtagagcgataagaggttgagtgcagacttgtagaacagtgaggtgcccgacgagaactgcaggtagtggaacgcactgcagaaacgggagatctgcgacggctctgcaaaaatgcgagccacgacgtcaaatataccggggctgagggtttcggtccttgttagaaactcttcgcgatcaaacttgaaagtgtagatgtagtagatcagaactacaaggggcgcgaacactgcgaagaaaaggtcaaaactaaaccacaccaatggattagtcataaggtatgactcattacgctacaatgcacaattgtgaaggtatcacttacgtgtagtagagccgagtaatgatcagatttggatccacgacgtagtgctggcttcggtagctggtgacaagccagttgcaaagcaataacaccgaatagtagtaaatgatgggagttggaaacccctttcggagatacgtatacatcgtcatggactggaaaataagcttcgggaggtctagcgctgcagtctgcaacgccaaacgcgcaccaatcgtagatgttagatacctgacttaatatctttcataaaaccaatgcacttacaaagtaatgttcacaaacgtcgcttggtagtccttgataccagcgcaaaccacgctggtacacgtttatcacgaacccattctgaggaattactgatagcaaaatactcgagcttctcgacgttttcgagggggtgctcgtagtgttttcttccgttgattccgactgtttcgggccccccttgtggtagaaaaacaccatcgtcactgccaacgccgtgtacccggtgccgaacaaggtaagcaatatcacggcagaaataatgatgccagtgtccgatttcgggagcagccagaactcgccgttgtcgaactccgtggtcttcatgatcttgttggccatcgtgtccgcgtggatctgaatggccgccagcatgaacgtccaagcggccgatacgccgaataaaatcatcatgggcactccgagcacgccaaagacgtcgtagaacgtggccacttcagtcgccacaatgttcgcgacggacggtcgagcatctgaaaacgacgctcgggacaatcgattcatcagatacgacggtcgtggtgaacgagatttctccgagcttggagaaggttctttttcttgttgttgttgcttcttttcctcctcttcttcttgttgagcttggccttcctgcttgactccgcatgaaacgatatcgtccgtctccagtacgagggatggtaccacatcggatgcctcgacgccgttgccgtcatcttcgacgcctccaaccacctgcggagacatctccgctcagcacaagtcaccgatgaagcaaccgcagcgtgttcgttgcaattttcacttgccgccttgagcgggaggataagcaagaatagcggcaacgttaagtgtgtggttttgatcgtttgcacgatgggacggtcgtttcaagtgtttttcttcgcccgtaggaatctcgccatcgaactcgaaacttctatctccggcaactaagttgataataagctgaatttctctgtatttagttgttgttgagagcaaagcctagattgagatctttgatcaggaacttgcacagccaaaccacgcctccacatccggatcgcacttatctccaacacctcgttgaatctgcagcttcctcattcgaatatacccagaagtcgtctcgcactggatgaccatcatcctcgtgttgtagcatattccttgaacgccatttagcgtgcactccttgtactttactccgttgcagagctcatccgtcgaggttttggtcggggcggtcttctctcggtcgacagggggcgaagcgggacagattgatctactaccaaacgactcaaccattagtttgtcttcatctgaaatacgggcatctgtgcacgtgagagggtacttctcgccggagatcggtaagcattgcgactcggtcatattgcatgtccccgatagaaatccattgcagcaaaccgcgcttcgggcgcggatgaccagtcgttaaagggctcaaagatggcaagactgtcgctcggggggcatgaatgatactcaaatcagtgacggacgagagcccgtcaaagtttggtatctcctccagcgagtccataacagccagcgttagataccgtaagtttctcaaggaagacagtgatggtagcttttccacatccggaactgctcccaagtgcaggaaggtgaggtgcggcatattgtcaaagatcccgtccgccacagttgcaagtctcttgctggtgaagtccccttcaacgtgactagaacgcatacaacgaataatggttatggttagattctcacaacaaaatatcttgttaaagtaacaaaatggcaggatacttacatgtattcgagatgggagaatccggacatccaatccggcaacgattcggttttggtgtagacaagaatgagctgctgaagagaatggcattctcttagctcttcaggcagcgcaggcacagcacgattgataatttgcactatatgcagctctccagcagccgccagctcggccagattgcttgtcgcatcaactgggtcaacccactcggcgtatgtttctaaagaggtcacgcggtcggcgaatacaagacacgtgcagtgtttgcgaccgatattccactggtagcttggaacaacacacttggcgtacttacgacacaaactttgcgtcgaatgcaccgatccgaccgagaacaccaggttgaaaatgccccaaaagaagaacaccagagaaagtaggagtttaggcacgaagtgcttccctgctttaggcttcaatctggacgcggttagagtcttcgagacgatagatttgaggcttgatgtgcgagacgagtcgattggtactggtccgaccaaggctttacgcttccggtcgagttcccgctcgtgataattgcggatcagcgtgagaataacattccgccatttgtaaagggacagcaggttcagtgcagacttgtagaatagcgtgtcacctgaggacaactgcaggtaatggaatgcactacagaagcttgaaatctgggacggatcgccgaatattcgggccacattgtcgaaggtgctgggggcgagtctccattcttgtgaggaattccgcacgatcaaactgaaacgaggtgataagtacacaagaaccacaaggggtgcgaacaccgcgaagaagagatcgaatctggccacaagaagcaacaaaaacaggttgagatttgcaagcgtactgtaaaataaaacttcacttacgtgtagtaaagccgagcaatgatcaaatctggatcgttcacgtaatgttggcttcggcagcaagccacgagcagcagcaagaccgagtagtaatagataatcgcaaccgggaatccatccaggaggtaggtgtaaagagtgatactctggaaaatgagttttggcagatccaacgccgctgtctgcagtggggaaatcgttagcttgggaacccccaaaacactcgaataacctcccatccaaaacttacataataatgctgacggacgtccataggtaaccggtgcacccacgacacgaagcgatgcaatacattccttgtcgaggcaggaggcgatgagggagcttgagttggcttgtcgacaatatcattatgcgagtcattatgtgacgcgtctgagtcctcgctggggcggccagcgcggtagaagaacagcatggtggcagccaacgccaagtagccaactccaaagagcgagaggagaactgccgccgagatgacgagctcaggttcaggctgcgggagcgaccaaaactgcccattgtcgaactcggtggtgttcatgatggagttcgcgattgtgttggcgttcacttaaatcgctgctagcatgaaggtccacgcggccgagaggaggaacacgatgatcatcggcactccaagaaacccgaagacgtcgtagaaagtggccacttcggcagcgacggcatggacgatggacggtcttggctccgacgacttcgatccccggaatctggacagtcttggcttgaaggccgacgctcttggcggctttgctggacgtggcggggcttgctcatccttttgcgtcccagaagttgcgacgtcgtcggtctgggctacaagggagggcaaagaatccacagccaaagtctccgcaggcgccgacacttgacttgcacttgcaggggcagtactgtcagcacgcgacatacctacagtaggctgctgccgaactagggacgaagaccgtagagagggagccgtccagtctgtcggctggtgaaaagtctgcgaccagtctgttggctaatggaaagactctttgaaactaacgtcacaccccgtcgactctgcgaagatatttcaatcgacttgctaacgctaaagataccacaagcacattaaatatgctaaaaaatgagcccaagcaaagctggcaaacgtatgttgatgatgatttaagtatttacccttgtacgactcatatttgtattgtgcagggcctgcacagcaagctttgagtatttagttcgattcatgacacacccacacacaatcagctctcttgcggcgcgtggtgactgcatagccaccgcgtacgacctgaaatcgtcgagctttccagcactcgatcacagcgccgcaatgctgcccagctactccgttccactcgagacgctgtcagattctcatcaccaaccaaggcgtccagcagatttcgcacgtactcgcgcttctcctcgcagaaaatgagcgcggtgagtacgtccagcacctgctgagccttctccgggtctcgagccttcagttgctgctccatcgggccaagttccacctcattgaccgggttcaacgtggccagctccatgcgttcaagcgcttggtagaacgtgcgcagctcttcccattgctggggtcctaacagtccgctggtctcgcccacgctgagaccgttggacaagatggcgcgcgcttcgaggaacagcatggtctctcggaccagcggcatgaccagagacagcaaggacgtcgtcaccgtcgcgccacacttgttggaggtagtgatactgcacggaaccgccgcgttggcctcgcaggactcgcacatgaagacaagcgggaaccgcagctcctctcctctttgttgttgtaggcgcttgagcttggaaacccactgatccactgagtaaaagctggcacggtacgtcaggtcaacctccagctccacggggggcaggaacagccacaaactgggcggcaaaggctccggctcactgtcgtcgccctcggtgaccacttgaagctccttatcgaccgggatctggtccttcccgcttgcttcgcgctcgggctcggacgacggacgttgtgagcctttctcctcgataatagccgagagcattcgagacacgaccgcgctcttgactgtcgtggtccgtgaaacctcgcgctccttggtctggaagatcttgtgcttggagatcgagtcaactgacggccgcgacatgggattgcgctgaagacactgcctcaataggtccttcatgtcaacactcggcacgaacttggcgatggatcgctggaagtagcacgtgttgctcagctcactatcgaggtcggaggtggcgagacggtcaaatacatcgtgaggtgctgaacagccctggaactcttccaactgccgaccggggacgtgcatcttgaggatcatcactccaagactccagacgtccagcgaggcggcagcgcgtgagctgtgcttgtcctctaacgcgagagcagccaattcaggggcgacgcactccgattgccacgtttcgagcaggtccggatcggggcacggaaccttgtgaccagctctggatgcgtgttcgaggccccagaacttcagtcgagcgtcgggcgagcacgctacgaggctgttggcgtgtagagctccatggacaagacctcgagcgtggagagcgcgtagagctgccactacacgggaaatctgctgcactagcggctcgcgagacgcagccatgtgggcgcgcagcgtcgtgcagctcggagtctccagcaccagaacgcagcagttcaacttcatcgcttcactgtcgttccccagcacaagctcatattccagagacgtatcgtagagccgaggagcgaaagccctcgacatctcgtcgtgctgcaaacacgaaagcgcgtagctctcacgtcccgctagatccgcgtcgtcttcaataaatatcttgagcaccagcgtgacaggaggggctggctcggagctcgcatcttctgcactaacgcggcagtcgataaaaaacgcgagtggcgtctcctccaccttgaccccatgactgaaggtgtagcggtgggcgttcaccgtgagcgtcgctggaccatcggcactgggtttagttaccagcgtctccagagcagatcgaagcgctttccgggctgcaagacgagcttgagctggcgtcgcactggccgtgctataagtactgagtaactcaagtgagtgagtactgtctcctgcatcacggaacgacgctcggcgtcttgtattgctcgcgtggaagtcctgtggcgacgcgaggttgacgtagcccacgttggctgaagttgacgactcgtgctggtggctggactcatcgtaggcgtcggtgtgggtgacggcgataacaacgcaagaagctcggtccttcgtgtcgtggtggtcgatctcaccgctggacatccgactgcgagagagctcactgtcggcgacggtgaaatttcccgaggtttcggatctgtcgcgccccaacttgccgaacggatgagggaggtccaagatggcgtccgtgtctcgattctgcattcgcttccgcttacgaatgacaaacgcgagtgtgacaccaatcgccaacacggcaggcaccacgacagcaacgattgtgatggggatctcctccatgtggtcaccgccttgaattttgaccgtttgatcgctccccgatgaagaatcggcctttgactcagtgtgagcagatccgatacttctggaacctacgatcgagctcctttcttcttgagcaacagagtccaaggtagcgatgacgacgtcgtcggccttcaagacggcgtcagccgtccacgttgtcaattgtttcttgtgagcagcggtctcagtagtcaagctcattttgtcgttctcgcgcagatcgattgtcgaaatggtgcttggtaacgagtagagagccgatggaaattcactcaacgcgttctggcggagatcactacgacacaagcacctggtaagatcgctgaatacaggtataatcaagtgtatggtgcaagcttacatcgttgagagatcggaatatgccgtagctagggcatccgcgaactcgaaggagatattggtgagcccgcagtccacaatcgaactgttcaatccaaagaagcaaaatgtgagaacttctgatacagaaaataatggggtttactatgatagtactcacatttgctggatggacgctgggagtaccaggtgcaggtcactttcagctaacgggataccttccaagtatctggcagcaaacaaacacaaaacaacgtcagatatcgaaagcacggacttaatctaccgctttatcatattacagaatttcgagggcggagagctccgcgaatgctgcgggtgcgatcgtgactgggacagttggagcaaatcccgacgcagctgaaagcgaaaacttggtgattgtcgaagacacgagctcgtcgactttggagaaggtcgaggacaggttcaaatcggacgaagacgcggcgacgtccgctccgctgttgacgtagaagttctgcaccagcgacggattgaagaacgccgacggggccgcgtcctcagacgcacaacttacgacccatttggtctcagactgggcgccgagcactgcgcggtcgcacgagagtgtccccgattgagtcgaagtcgaggcgttggcaattgtgctccagtacgccaaagcgaacactggcaatagcccgagctgtgaccccggcattgagatggcgattccggtgtactctcgctagaatggaagctcaataaagctccttgaggctgtaatggttggtgtacgcgctgggcgtggagatagcttttgctcagaccctgcagcaatccaaaggcagggacaaagcaaagtggagaacggggtgggatggcggcaggaatgcaagtgaaacagcccggtggtggcttccggaaacaaaaccctcatctgacccctggatggcgctcttgaggcgccaggagacaccttgacgacacagagtgcagttctttccgttgtcaacggtcaactggcgttcaaccaacccaacggcgcgtgaggaagccgcgcccaagcttgatcgttggttgataccttcatttcgttagcgtgccgccactgagatatctgacggcacaacgcaagaggctgtcgatctcaatactaccacatgatatgataccatgggcaatacagagcaacgagcagcaatgctggacgatagcagcagagcagagttgaagcagaggggagaaccgtcagacagcactgcactatggtgcagcacttgcactcggccgttgaaaaccgttgcggcccgcgtcgtttcgtgcgcaatgcggctccgcctgttcgtctggtacacgagggtggaagctgaacatctcgctggacggaggcgcagggcggaatggagcaagtacctgaacaccacagcgggcctgatctgctcgaggaccggttattcttcactttgccgcgcgtcgtcgactgcagagcgtggatctttgaggctgccgcatctagttggagaatccgatcttcgcctttcaccgactaccgagtccgcagcatctgaccccagcagcaacaacagcaccacgaccgactgatagcaaaacccacgagggtgtatttagcgtgagtacttcgcatttggacgctgcgtctttgcagcgcacacgtgccgtcccctgtctgcttctcgttctctgcgcctcctcttgctacgtcgcaatgtcgatgcggtcgagtacttcctggaatatagtccggtcgatgagagctgctttacaccacaccctggcggaacatggcggcggccacgctcatgaaagccgtgatgttggcacccgtgtggaggtcgcccgcagcgttgaactcctcggcggaagcggccacgcggtcgtgaagcatgtacatgtattctgcacacaaaaccacaagttaatacctgtacaacgtcacaacttctcacatgcttggccaaacgcacccttcacgatcttgtccagctcgtcgtccgacagctgcgtggacgcgccgaggttcttggtaatgagcgcgaaggagccgccgttggaggccttgttcgggccgaacgcgaggccgtgctgcttgatgaggctgatggcctcgtctgtgcaggggaagttggcgccctcgaagatgcccttgcagccgttcttcacgagcagacgcacggcgtcggcgtccacgtcgttctggatcgcgcacgggaaggcgtagtcgcacggcgtctcccacaggcggccctcctcaatcgggtggtagttggccgtcgtggacgacatgatgtaggcgccgagacgcgcgttgcgttcctccttgatgcgcttgagctccgccagactcttggtcgtgaagccctgctcctcgatcacgtagccgaagttgtcgctcaggccgatggggatggcgcccaggtccagcagcttctgggccacgttgagcgccacggtgccactgcccgagatcaggcagcgcttgcccttgagcgtctctccgcgcgtctccaggatgcggttggcgaagtgcgccacgccgtagcccgtgacctgcgggtagtggtaggcgcctccactcagaatgccctcggtgcctcccggatgcagctggcgcagacgcttgtactgtccgaacatgtagccgatctcctgcgggcccacgccgacgcccgacgtgggcacgtccgtgtgcgggccgatgtagttggccagctccgtcatgtacgactggcagaagcgcatgatctccgactcgctcttgtccatggggttgaagtccgagccgccgtgcgcgccgccgtacgggccggccagcgcgttgcggaagatggtctcgaagcccaggaacttggcgatgccgtgcgtcgtctccgggtggaagcgcaggccgcccatgtacgggcccagcgcgctcgagaactgcacgcggaagccgcggttcacgcggctgctgccctcgtcgtcgatccacggcacgcggaactggatcacgcgctcgggctccatgagcgtcttcatgacccacgcgtacttggggtagcggtcgaacacgggcacgacggagttgacgaagttctgcacggcttgcacgtactcggcctgcaggcggcgggtgttagcgtgcgacggcgcgttggaaagagcagtcaaagggcttcattttgagccatggggggcatgcgtacctggttggggtcacgacgaatcacctcgtccgtgagcatgtcagcggcctcctggccgttgcggaaccgcttgtcgccgccgcgcctgaacagcggcttgttcttccagtgcttcttgccgtgcgtcgtgccgtgcacgtccgacatgagcgacgaggcggcgcgcgccagcgtgggcgtcgcgcggggctgcgagcggcgcacgagcgacagcatcatgggggtcgacgcctgttatgggggaatcccgactggcggcccaggctgaagcacgcagatcttcgagctgagcccgctccggtggtccaggttgccagatgggggtacaatgttgcgcgatcttgcgtgaagttgatggatgggaaacaagttgcgcggaaggtgcgcaaatagagcgaaagttgcgggggcgaagtaccggccctgtgcgtgtttgttcaagcagttgaggcatcccgctgacgtcactttgcatacttgccgactgccactggacgtggagatgccgacggcgggtgtctcgggtaaatgtatcggcacgacttcatggtgcttgagcttcgtggcaacaattgcagcatttgaagcgtcttcgggtcccaaggtaggtgtgtatgctatcgcagggaaatgccatggctggtgtgtgttttgcttcttctcttggagtacagatagattaatgggcgtttgcagttgagagttgggccgtggatccctcaacctcgtccaccgtttcgatgcctgggcagcgtcgccgtcgtgacctacttcctgtgaagatgcctcgctactgaagttatatcacggagtctatgccgaagtagcgtgtcaatcaactgagaacgaccatatcgttggtcttcaagacattcacactaaaaccccgaactgttttgttagcattgtgtaggattaagaattgctacaacttggacattcctgtttcggggccgtacttcaacattcgatttacctgtcgtgtcgattcaagtgcgtgaaagtttttgctaccatcgaggctgtttccctcttgacaatagacctgttaaaaaaatcaagaattaaaaatacaagaacctatccatattaaaaattaacgtcttttttttaatctacaacggtcgaggttttcgataccgcgttaagtgggtaaaaaaaaaaaacttggtgtgttttaacacccaattttgtttttctcagtttttaaactggccctaaattttcagtttttaaaaaaattgagaatttagggccctctacgccagttgataaatctcgcagtatcctgtttaaaatatactacgaagctttgcgttgctcagtgggcagagacctgctgtctattgagctctaactgggttccacgtgtggtggctgctggagttgttcccacttccgctccccagactcagcagtgacgatgtcgggtccttcgccagcgtcttgtacttcatgccgagcgattcttgtagtaagcgaatactcattggcgcgtaacccgtgtaggggaacataaagtgaatatccgaaggatgtctggtgtcctcgtcatccagagcaccgcgcattagcagaagctgcttgcgcattttagggaagtcgaagcggttctcgacagagagcagatccatcttctccaattgcacaagcagcggcagaatttggtggccgtaagtatggcaaagctgctggcgataccaggccagcgtgtctggcttaagtccgccgcggacgagagagcacagacagagtagcttgatcacgtcgtagagattcagcggaggctcacgcaagatagcctcttccaaaaagctgtccacgtccttggccgctgctgatgacgcactcgggccagcactcatgatggtcatttctgtctcgacgcatccacgcagtgcaagctgcgtgctcagctctcggatacgctgcacaagctgcaagtggtgggccaacgatcgcttcttcttcaccaaatgcggcgccttggccaagagagccttcaccttctggaacgctgcctggctgtcctttggtaagtcagcactggacccggccgagcttgccccgcacttctgtggccaagtctttggcgacatccacgagctggttggagaccaagttgaagttcacgtcgcggatctcgtcgaacagcgcgtcgaggtggttcagcaccactttctgcgtcgtcgtggtcgttgtcgactcctctttgatactgctgctagtgcttgcagcgtcctccgcgtcctcctcctctttctcgtacgtgacgacgccatggttcacgcccacgagcgcatccagcagtccttcatacgtcatgggcgtcagcaacatagacaaagggtcttccatgcggtcaatcactaccaacttgtccatgggcgcagccacatcggcctccagctccttggtccctgcagctcgactcatcttgatcttctgctgctgccgatgggccagctccagcatcttcttgaccctctgagcgaagaacccatggcacgtgacgtccaagatcctccgacccgtgtgtctctccacggccaatacactcttgacgacgtccgtcagcgccctgctgtcccccttcacatagagttctccgaagacactgtcgtgacacagcgccgcgacgccgcggtccactgggatgaggcccaacgccaagttggcctggcggatgaaacccgccacaccctgtcgctccatctccagcgtcacgtcggaggtggccgagggcagccacagcacggcacagtggcgggtcggcgcgagctccagcggccggagggcgtcggccagccgcttggcgacggtgggcagcggcggcgcgaccacagccacgtccagcgtcttcttcccctgttcctggttggcctgcgggtccttggagatgtccaattggcgctgcagctgcgcgacgtcgcccgtttgtagctgcacactcagcaggcgcgagatcccgagcttctcgtaaaactcgctgccccccgagccgtacgcgagcagctcgaagatggccagctgcgaggcatcgacggcgaggactaccttccctcgggacgagctggccgcgcctaaggccagctcaagggaccgggagaaagcggtcaacgcatccgacttcagcgcggcttccagctccattgttgatcggtactgtacggtgatttataggattggtatttagtccagctggacctattctcggtgttcgtcatttgattttagtccttgaaggtatgcatctacgtgtacgacaagctcagctaccgctcataagtccgccgactgctgcggagacttggtctccacgaatcctgctgacttgggctgctggccgccgctgtggaacagcgcctcgatgtcttccagcatcatgcccttggtctccgggcagaagaagtacacgaacacgccgcagatgcagcacagacccgcgaacaggaagaacacgccgttgatgttgaggtgcgggaagagcttgaccacctccgtcatgacggcgcccatggcccagttggccgcagtcgacagcgccacggccggcgcgcgcacgcccaacgggaagatctcagccgggtagatccagcacacgggcccccacgagatggcgaagttgaacacgaagaaggccgtgcccacggcgatgaaccagccgcccaccttggggcaacccgcgttgtccacgttgccgtcgcagataaccgtgaacaggatggcagcgaacaggtgaccgacgaccatgcccacagcgccgatgagcagaagctggcggcggccgaacgtgtccacccatcgcatggccgggatggtgctgaggaagttgacgcccgagaggaagaaggccgcgtagatgccagcgttggtgatgtccttgaagatgagcgcgccgtagctgaagatggggttgatacccgtggcctgctgcagcacttgcagcatcatcgcgatggccacgcgcttgaagatggacggctcgagcagctccgtgagtcccttgttggcggccagctcctccgcgacctggtcgccgatcacctcgagctcgcggcccacgttgtcggtctggcggagacgcttgagcacgcgctcggcctcctccttgcccttgtgcaggtacgtccagcgaggactctcgggcacgaagaagatgccgagcatgaccacgatcggcgccgccatggccacgccgttggtcgtgcgccagccgttgtcgtggttctccacgatgatgttgacgacgttggccaggaagaggcccgtgacgaccgtcatctgcatgaatccggagagcaggccgcgcagctccttgggggccatctcggcgccgaacagcggcagcgagaacgacgagttgcccacgccgaagccctggatcacgcgggcgatgtacatgaggccgtgctcctgcgccttgttgaagcagacccacaaggtgccgacgcagaacagcaggccggccgtgaagatggtccagcggcggcccagcttgtcggccacgatgccgccgatgaaggcgcccacaaggcagcccaggttgtacgccatgttgtaccagaccgtgaagtccgtccactcagccggcaggtccgacgaagacgacgtgcactgctcgtacgtgaagttgtgccagccgacgcagtagtcgttgatgaacgagtccatgatgagcacacccgaggtcacgccttggtcgtagccgaagaagaggccacccagcgcggcgaacacgcacacgatgatggcgtaggtgcgcgagccttcggtcgggacgtcatcgtcgttgttgttgtggacgttcaccacgacgccggcagccattgcgaagggggggagtggaagcgaggtagccgcagagcttgctagcttgttgtgttggagtgagtgtgcttgttgcagcaggctgagaattgcagaatgaatgaggcggtgacacggtcggtggtgcggaggcaattgtcgcttgatcgatacatgtactgtacataccgaggttaacggtttcctgacgattgatcaagtgatcgggaatccgtacgttatcttgaatcggtacacaagtggtccagggagcctccttgttaatctcctccactgcacgttagttcattattctgaaaatttagcagcattttttaaccctttcgcgagtatcctcaataaattatagtatacaactcattgatatttccttctaaaagggcgctctaggcgtccttttacaaagttacggagccttttcggtgtgtctcatgggacatgccatctacggtgatttgcaggatgcatagaatgaatgcgtaagacttagaatttgtatagacaatgattacatgacgattactctgcaaaagggcacaggatgcgccctttaagagggggtacactctaccgtgttttggaagggcgctttctgtatccttttaccgcggtcaactccacgttcaagaatactgtatattctcctccttacacagcacgacatacagacaacgacggataaatccggcaccactgaatggcatcctccatagtaaatgtgccagaattctctgtcaggaacgatagagattgtacaaggcaatgacataaaatacacgtaatggagcataaagtacacacaaatttagagaaagtacttaaccccatatggaatacaaatgtcaagtgtaaatctcgaagttgattagctatctgaattacctattgtaaaatgcacaacatatgtgtgccgggttttgcgttgccgtatttatccgtcgttgtctgtattccttgttgccacaaactgagaggattctgatgatgagggaggaaaagggtcaacacgtccattgagttacttttctttgctaaagtcatattttaatacatgatatttgtcacgacatgtacagtactatacaaggaactagtgctttctacgttaccgttatctggcttacgaacaacataacgttatctaccgtgttacgtaaagtttacgtacgataacaaaaagctgcattcattggtttaaaatgtagcgtttgtttcattggttaaaagtcatggcattagtcgatgtcatccactccgagttatctcatcagtggcatgcccagcggcatcgagtgcgccaagcccaagaagctgacgctgatgtcaagccacaactcgagcgcagtgaaccggggcgagtctttcaccgaggacaccgtgcgctccgtccacatcaagcacagcaagcgcctcttatcgtctaatcgtctgcgctgtgtggcgtgtcgatctgcgccaaatgcctgtcggcgctgtctgttctgttcgcccggcaccaccggcagcgacggctgcaacgcgtgcggcagtcggtcaagctgctgccggagaaagtcgtgcttgagttgtcgctcgagtgggacgacggcgacgaactcagctcttggaggcgctggttcacgtgcttcctagctacgagcgtggcgtgggtcaccgtcatcctctgcacctttaactcgcccacggccctcgcgtccacgtccatgagcgcggagcaggcgcggccccacatcgtcttcagcttcacgacgacgcccagaggcatcatgcagcccatggtggacgcgctcgtgcgccaggagggcgacggcttcgaagctgtgtacgtcatcgcgcccaaagtgtaccgcgaccaggtcgtgccgatccccgagtggctgctggacggccggaccaagctcaaccagagcgagttccgcggcatcatgttcgccacgggggcgagtctgtaagctccggctcatcgtgctgcttgaccaagagcaagtgcttgtttctcgtgtccgggcagccttgcgctctcatcgcgaactgtccgaactacgtactcaaagtgcagcaaatgacgggcatgcgaccgtggcctgagtactctgacgtcgcattcttttatcgtcatggaccagcgttcgagttgtattccggtgctgtggtacgccgcaggggtccatcagtagtgcatggattcagtccgtgacgagagcgagtggtggggccacgagaagaccgatcctggctcaatctccgatgctttgcgagaggaatctccatagcttcccacagacgcgacggtggacgagacctgggttggaagcgacttcacgggtgtcttcgcgtctaaactaagcgacgagaacgggttcagctccagtgcagcagcagaagatgacgacgactgagcgcttgacgacgcagagcagcaatgacgcgagcacccgtaccaagaagaggtaaggagtgttgaagtcaaagtcgagtcctccttgaacgccttgccgctgctgctccacatagttgccaagagcagtagaacgacttaatcatgcgcaaaatgcagtgtatatagacaatcacatgtagtgcccgtagcgcggtggtaggacaaatcggtgacagcgtaattcatgtgtactatgttttgccgcctccttattgtttgtaaagtcgcccgactcacctttatgcatcgtttcccaacttgcatacactaatcgaagagttaaaaggaaacacagcgtagttgcgccgtaatgaggatcaacaccaatcccagataaacaaacgtacattttcattgcccattttcgtggacaacattccgattcaacaactatcgacctttgctatgaacttattcatcttcgtcattgctgtcgctgtcctcactggctaaattgtcatctgcctcctggtagttttcgccaacaaataagatatctcgaactgtttctgggtccagtgaacagcgctttgaggtgacgacgtttccacttttagaaaaagcacgttcggagggcaccgatgtggcaatgcagcctagccattttcgcgcaagcgctgccagaatgggaaacttgcttcttcggtcctttgttcaccactccaaagggctcgtagtaacaggagtgccatgcgcatcgctcaaatagagagtcagctcagactcacacttctcttgcagcttttcatcgtcagcggaaagctcttccgtcttacattcctccgtcccgccagaaaacacatccatgagccaagccaaattgtcttttttggcgcttgactgaggtgtcgagcgattggaaatctgcccatgcctgctttgaaattccttggcctcgctcatttccttagccatctgaaacacagccattttcagctttgttctggcaagggaagcttcgtcccgactgaggtacttgaactctgctgatcgtgggtctagcgctgaaatccatagcagctcatcaggtagcttatctttcaatttttcggaaaagagcttgacataagtccgccgaattgtctgcatccatgtctcgacgcgatacttgtactcctcatcaccgacagatcgaataactggatcaaaagctttgtcattcttcagacttctctggattaccggaactgcaagcacaagggtggggtacttctgcccgccaagcccatccgtagcttccgcaaaaggtcttaaaagaacaactaaacaccggatagtaagccagtgctccgccgttggctgttctgccgtagagtccgaaaactcgccggtctgggcaacatactcgaaaaatgcgtccagggagctgcgattttcgatcattcgaagcagcatggcgtacgtactattccaacgtgtagcgcagtcagactgcgggaggagtacatcgcgattaccttgaaggtcacgcaagcagtccattgctttggtcgagtgactgaaaaaaatagacaacttgcgaaacttgtcaacaattgaacgtaattgatccagatgtgcccgcgaggtttcccaagattctgcgataaattgatcgatcgcttcgcatgcttcttgctccagagcagcttcaaaatctttgtctgaacttcgcggcagccagcattgcctttgcagcttgatccgatttctttttcacgattccagcacccacaattagatgtaaaacgtgggcaagacacgacatcgacttgatgtccatgatctcgcatgcccgtcgaccattagatgacccatcgcgcagaaatagcacacacttctctttcggtagaccccaccacaccataatcttttccagacagctagcaatgcgacgtccgtcgtgctttcccggtagcaccttaatctcgaggacccagttcttgagatcaaagttgcgggtaagatagtggagggtgaacgaaataaatgcgcgcttgctcttggatgtccagatgtcggccgacgcagtgtagtagtcacattcatcggcaatttcatcctttagcgtttcacggagtgcaccggcgatgttgtcgacattttcacgcgctttccacggcttggccggcttgatatacccttcgacagagttcagaaaacgggagtacttccggaaatacttgtccttcagaatattgaacggccgcatggatttggcaacccaaattgccgccaacgtatctgctcgggcttgctcttccgcagtagcaggctcttgacgggtcgatctgtcagggagatcttcaacttctttatgcacgagaacttgagtttccttctttttacgagccacctccgctgcctccgcttcttgcagctctttggtatggaatttccccatgtgtttggtgacgtacaccgtggaggacgtttcaaacttgatctcagtattgcactttgtacaaaacgcacacctcgcgtgttcagagcgcagttctttctcgggcaacgtcgcaaactcgtccttgcataccagtctaatgaacatccaatgttgtggcttgcgcatcttccgaatgttgaacaagcggtgggggcagcagcatcacgcccagcaccaacgaatgcgtttgaacccgctacagtagatccaggtgcgggtgaacggtttttgtgttgggggcactgagaatttctgtggcggtcgcggcttttcttcgaacgactcggcgtgtttccagtgcagtcacttggaactgcaccgcttgatcttgtcacacacggattacttgaagccaagccagcaattcttggcgatcgacgtcgttgcacattagcggtgtcgagaagccgagctcttccaggtcgttttcagctgagcgaccaccccttttgcgggtgttggcttcggtgccagaagccgatcgtttccctagagctgattttccagcgattcctccagcggttggaggagatgggaagtccaaacgcgaagtcgacgtggaatgagtttgagcaacataatcagctaatctgctgcaaggttggcggtaagtagagtctctcgcgtcttcaatcttggtttcatcctcaaacgtgagccgggcacgaactggggggctctcgaggggggatatcggcggtagcgatggctcgtggtaaaatgatcgcggcgccaggaatgccttgtactgctgggcgcgatcacgctctcgagattgcgaaggcgcagcacctggtgcgctgtgctgctgtcgagattgagtactctcggcgggcgtcatcggagcggcttgacgcgtgtcgggcgactcgcggggcgagggggggagcgcatggcaaatatccaaatgggcatcgaaaggtcgcagtgaattacgtatctttacgttctatttttaacgagtacgtaattttttttacgtaatcgttcgctaaccatcgtaacgtagaaagtcctacaaggaactaactggtttttaaaagtgtttcaaaaatatcacctttgcggttaaaagcgaggttctgcaggacggtatcgcttacagtaagtgtatttttcggtatcactggcaccgtgacagatagccagctaagccgaaaacaaattcaaatgtatttgcttgcgtgtataagatatgtacatgtaggtggcaaatccgagcattctgaagttacctgtactgtacctgtatctattgtgctgcttgcacggaaagatgagtcccaagtgctgcgacactggaagcagataacctataatataaaacacttgtttgcatacgatccatgcagcgactttcgtggcattgcaagtgacaaacctgaccattctaaagtatcatgtactctacaacctctgccccaaggtctaactacaaacaacaccgagacggtagctatactgtgattattcggcaccggtacacaaacttctagtagtataaacttgatctcaatgaaatcaattatacatgttgcctaaattattaaattaacgaataatgtttagggagtggagcatcggtggggggagtacatgcatcgcgagtccccactcaggggaatgtacactatcgaagggagggggcacaatcattggttttaaagcactttacggcatctggtgttagtacacatacataataaacaacgctctattgtactgtatttctcaaagaagagtttcacttggttctgtagctatgctttagtatgtcacgcaggtattaagtccacatatttagaggcacacagcctgcgtggataattatattagcatatgaactttgtcaaagttgaaagagttcacggttgtacggagaggaaagtcgaaattttgcagttgaattccctcgtacatgtaccgcggtaccgcgtaaccttagttatgagatactacatgattagggatacagaacaaactgtccaatcaagagtcacgagggaaacatagcacttcccgaagttacacagcgttttgtatgcgagcacttttctctttctctgcaaatttccgcgcaaaaacgtcgctaaaacagcatctccagatgtactcttcacttgcttcactgcccccgtgctagttgtgcttaaatgccacctaccttaaccgctgcattgactggaagagggggcgtaaagtggcgactccacaccccgtgtcgtcttgtcctcttttaacgcggtttctagcgctctctgcggcatccggtaaaataaaaataaaaagtagttgactatcgaaaaattaggtgaacggatacatttcattcttatcagcgattgcacggtgatacccgcacgtctctagcacacttggaccttggttgtacggtgataccaacctacctctgttaagaacgcccctgagcatcactttgatgctcaaaaccacgaggaaactccaaacccgcatacttgagtttcaaatccacaaaacccgcgtacttccacaaaacccgcatattgggaacagatgccaatagaatcagaaattattctgggcgataaggaagctagaagtagctataaataaatgtgcaagcgaaggtctctcggcgctgaagcaaaacgaaactctcctcgtgactcaaggcatgtccgctctggagcgtggacagacctttaagaatggcaaggaggcaaagtacgccgtcgaagactgcgctctatcagtgggcaagagtgtcaaggtcggcccgaacggcgggggtcacaagaagttcatctgcacgtcagaaacaggaacctgcccattcttcgttcagctttaccagcttaaagttgacgggaaggccaccagcacttggcggatcagctcgttagctctggagcatatcaactgcacttcagtgcctaagatgactgggcgtcaactaagagaatctgccgtgcttcgaaacgcggtttcatccgacagtgaattcttctaccaaacatgacggcagtataccgcggaaaggattccattacggagggcactgttagtgaacaagctgagttgtaccaaaagatcccatctcttctcgggaaactcgcttccagcaatcctggctcgttaaccgatttccagaccgactccactggccgactgttgtagtgtcgggtcctctggtgcgcagcatgccgtacaaccaacagatattaggcatcgattgcgcacattccaagaaccgaagcttcagcggacagcagatgctgctcgttggtcgcgacggcaattgcaacaacatcaccattgcgatggcactggttgacgctgagggcatcgtcaactacacctggtttgtcgagtcccttcgtcaggccggtctggacattacagagtaccctgtattttgtgaccggtgcgacgcattccgctcggtcgccgctacatacaacatcaatgtccggtatgccatgcaattatatgctttgatcacataaatgtaactgacccccaatgatgtttgcaggtgcttgctccacatcatcagaaatacagtacattcaatcaatcgcacaaggagctggtttgggagctacaagcttgcaagtacaaagagcaatacgagagcatactgatcgttatccgcaaaacctgtggtgaaaaggtggaacaagctctccgcgccatccctccagagaaatggatcctgtatacaacattaggtgagcgtcctctgtatggttggcggtcgactaactttgtcaagagcaatccgacaactgggtgaagcagaacagagtggtgtccccgggcgcagaaaagttgtactttgaccaactgagtgaaatggggaactacgccgtcgtgatgcttacgccaaggaatggatctgtctcgcgcgtcggcaagatccccccgtttcgccgtactgtggacttggataccaatcgctgcacgtgcacatacatggatcaacaccagattccatgcaagcacatgctcaccgtactaaatgtagtcggtgagctggagtcggcttattcaggctttggatcgtgttacatgatcgaaagctactcaaaagcgttttcggcagcctccgtgatgattccagcttctaccgagcttactagagccccgctactacctgcccagagaaataaaacacctcgcggaagaaagcgcgtcaaacgaatccctagtgctggtgaaagcagaccgactcgcgctcaacactgcacaaactgcggcgaacccagccataaccgcaaaacatgaaagaagccgcctcaacttgtggtcccaattgctcgaagtgtcgccaccagcactaccccaactcccccaacttccagttcgactctcaccaatgcggctaccctagctaccagctctctctcgtatgaacaccagctcgcctcagaccgccaccagctcgactgctcgcaccagcaccacgactgcaagattcgaccccactctgtgagccagcaccatgacatctacgaggaccggctcggcatgaacccccacgccgaactgctcttgtgatggagaacttgcacagttcatattatatttcttacaataatatttctgattctattgacatctgttcccaatatgcgggttttgtgaagtatgcgggttttgtggatttgaaactcaagcatgcgcaggcctccctaattgggggaaatggtccccatttcccccactatacccctgttaagacccgttcccatcccccacaaaaatactatggttctgaggtgaattcatgttggcaagatattttcagataattatgtggcttgataagcatcgagctcactcagaccccaaacaaacaggaacatacccaggtggaagcgtgtttctccggtaatggatcgacccccaaaccatccccactcatcacaaatattgttaaatttccgtaattggtggtattggcaagtagcatttcagctcaaacggacggcgagctgaccgcaaactggaagaggccgttggtctgtaggcgatgctacagaagaatgcaagtttaggagcagttttatcataggctatgttaataaataaaatactaaatttaagtaaagcggcgccaatatcaatacgtaagccctaccgatcaagcaaagttacagagctagtcaaaacttttatcactattagtgatatataattctttcgctgacatccgtttctagctaattcgtacgtggggagcatagaacgagccaccgcataaagcgagccacccgttcaatacaaaaacctagatgccctccccgaaggaggtatttgcgcgcgcatttttcagtgcgtttcacatcggaaccagcgctaagctcacgtatgccgtgaaccaagatcacggcctcttcgcccccactttcagatgtcaattttcttcactggaagcggagctatgggctctccattatggcccaaattggcccgctttgtctgagccaagcgactagtgatgtgtgacacataacgaatgcctcaatacatgatgtgtcacacctccctaaatgaacccctctaactgactatatgttccctatctggttaggattcctcgactgcaaacgggattatatggatttcactatcggtgttctataactgatcaaaaacctctttattctctaaatggtcgccattgttggcgcctcaaccctctaaatggacgccgtagtaatagatccaaactcatatattttttctcaatcgcttgcctgcctcctcccacgtatgtcattgctaccactactcccgccacaacaaatcgagcgaagagagaaattttatttgggatgctaagttggaacaaagagtttgcagtaactgcaagcttgtaaaaactgataaataagctagccacagtacttttacaatcagcgcagcgtacatatatattttacgaaaaactaaaatattatgatgtcgagacaactaggggctatgcagtagataccaagcaaaagataaaactgctggcatggtggcaggatgtcgggacaacaaatattcctataacctcactgtattgaaactcacgtacaacctgaggggatgcgattctgctaataccaatgagaagaaggagtaggaccaggcaataccgcgcctaccgatattggttgagctctgtttgtgtgaagacgaaacgaaacaagagtacgaaaatgctggaggggtaccaagcccttgtgcacataagccattagaaatgtagccatttatttatctgatcaattctttaactgaaacagcgtattagaccgagcgaactgggtgtcatttatagaggtgtgactgtagtgggagtggctcgctttgtgctcgcgagcgtagcgtcgaaatcaggtctgcatacaattatcaagataatgaaaagcggctcttcatacgctccccacggatatgcggatgaatcgtaacactttgaatatcgtaggttgaatccaaattagcaccggctatgcaaatccctaagatatttatcttacttccactatcgtcccccaccatacccattttaaatcctcaagtcgtcccccaattagggaggcctgagtatgcgggttttggagtttcctccaaggagagtgactattaccacaataatagagccaaatagccgacatgtttatgaatgatagaagtggcggcaagatgttaatatcggatttgcccttcatcgaaaacaacgccttaccaaaataacgaaaacgttagtttgtttggcatcagtggtcgtgattcatttcgaattcgcccccctcgagcgcaagcccaactcaagtgcgcgcgcacctccgccgccccccccccctcgctgcggcatccgcgctgctgaactatgtcctgtcgtacctagcgcctcccctgtacgcgtcagggcgactacgccatcggtcgaacaagcatcgggccctcgaagagtcgggcgaatcggcttatgaagcagactgaaggttgatgaggatctggcagtggtggcgcgcaaccgtggaagacctatccggcaacaggtacggcacatgactgaatttcgaagaagcacttactgtatacacgtgcagatacactttatgtaaccaggtttcagtattattctcatttgttttaattgccagctagtactgtgcttgcacaagccgtactacaggtgcacatccacaagccgggccgctcaaaacaagcgcagaaacggaaagtctaaacgctatttgaacaagtcatttagcgctatttcgagtacatccacgcctaaagccgagcaaaacgcaaaggtacatctgtcaatttcaagcctattataactcctgatttaattaattatgtagcgtggggctcaggttgaaagccttgccctcactgcactttggtagttactgcggttacagtctcttatcagctggcacaagttgcagttgcagttgcaactgcaatacttgcttgaagccgtggctcgaagagcaccatggcgcagaggagagcttcctcctcgcagtagcgagagcagcaatgtctaaagcgcgtagttattcacttttccttttgcttcctactaagcaatacaatcggcaacaacaacttacggaagtgccagcttccccaacactgtctaccgttttcgtctcgtggacgtactacaaattaaacgatttggtgccgccacagttgccgattttagcgccaatgattccagtacatctcccaggtatccaagctcaatatgcaacacaatgtcgctctggattgttaattgtttgagcagctgccaagcacccacgcatattgattgacgagaagttcgctatggtagcatatcgctgcgattctaacccctgaaaaataccttaaagcttgtatggtgcttccggccaataggagtgtgtcgtctgcgattcttagcatttacaaccaatagacactaccgttgcttaaaatttcgaccaattaagtcgagggaatgactgtcaaccgctgatctgagcattccaacgatatctggttggaaacgtgatttgatatcgagtatgccatacaaacatcaagtgaactacaaatagaataaatattcataggtttccaacccctgccagctcatctccgactccattctgcgttccgacgcacacatgcatgtcggtggcatcgctagttcctgcgaacagccagagaagcagagcgacggctgtgaagtccttcgaagacttccttgcgaagaaggaggtgacgctcacagaagtgcatgatcgtatttctaaggacagcacaggcaagagtttgtttgtcattctagataagtatgggtggttcttagtgaaaaaagtaggaaggcaaggagtagctctgtccaagaacactgtgctatcttattttggcaatgttaagaactggctggcggatctgtacccgcaacagggccaatgtgtagctaagaagctgcaaaagatgctatcaactctagatcggtactgtgaaaagaggccggagcaaggtgtcacgaaacaagcgccaccatgtactaagaaagatataaagactatcatctcggctctctacatgcacgcttccgccaactccgactacctggatgcagcactagtggcgttgatgtggtacctctacggtcgtggttctgaggctgagcaattggagaaagcccagctgtgtgtataccccggtacgaatcgtgcaggattttgaatttttgtattaattaaccccacgatttatgctgacaattctgtgcgtatatgctaggcggtatgatatttctccgctttaagcctgtgaagactgcttcgcaacagggaatctccctgtttaagggtcctaacgatcccttcacgtgcccgttacacgtgctagctgtcgctctcgcccttcaacccgctccaggaactcgcatcttcccgcaatttgctgccgtacctgcgctgtccgcgtccgacgaccaagacgacgatggcgagctggggctgattgcgcagctagaccgcgagcttgcggaagcacctacatgcaagactccacagccatgtcgagccaactcggcctctggtgcccaagcttatatcaataggctattagtcacggttagtgggctgccagcagcaaaggagagtggactcacgaagggacttacctcgcactccttcagaagaggtggggccatgcacgccaacgccgacagtcgcattagcccgaactgggttgttgaacgcgggggctggaatatgtcgcgcgtgagcaaggcgttttcctacatgctgaacacaacacacgaagatcaacaagttgcgcgccaattgagcgggtggaacccgcaagcgggcgcccgacttccagaccttaccgccctggacggagttgtccgagcgcgcgtggagaagctgcaggatctcctcttcgctgctgtcactggtttcccgacagtgtcttggaacttggatcctcaggtgctcgaagtgttgatggcgaccttgatccttcacttccccgagatggaacgccatcgcttggatagcccgtacgtccgtcgcattcatgaagcccttggtgtcctcaacttacaggcctccgagctgttgacatggtcgatcaccctccgagctgcattcaatccacctgcagaagagaaacaagaaacagtggccgagtcctctcgaaacatgttccgtgttctcgaaaagctgtcgcagcagctcgacgacctattgctccgccaaacacgcgtagaggaaaggctggctgttttggggacgaaagcagaatctattgacaagaaaacaaacactaccgagcagcagcacgaagacgttgagcagtcgcagccaaagcgcgcgcgcaaacgtgcctccaaagcgctatcgacagtgtggttcgagtggttcactgctgtaccacgcatgtacgaatcaacaacagttagcaaagccatccttcacgagtcacgacacgcagttgcattcatgatgctctgcttaccttctgggttcaagctggacccggcctcgccagcgtacaaggcggaggtccacgctgttggagtcgaagccgagaagaagacgcttgaatacttggctgcacaaggctcacaggctgtagccgttggctcggtcgtcaaagccatgcgtgcgcttcacaaagcaggccacctttccgtcctccttgaccagtttcgcgagcgctactatgaaggcgaagtcgtcgacccgacacccaattccgcccttccgccattcctgcgcttcacctaaatgcacacgcagcacactaaacagtcaataagatacacaatacgtacaacaggcgtagcacgcactctcttagctgacctgtccaaacagaaagcaaaaacacataatactttatgcccatgtcggggtttgaacccgatcctccaggcccgaaggcctggcgctcaacctcacgagctccgtgggcgcgggtaagtcgcatccatcaacagcaccatcctcgtccaaaccctcggccacttgagctacacgccacgagagcgcacaggtgcaacccaaaacacgtcccagcagcgcacatagcccagcagcaagtggcccggcgtcagtagcacacacggcccagcagcacacacggcccagcagcacagacggcccagcagcgcagacggcccagcagcacacaggccccagcagcacaggcggcactgcagcacacgcggcacagcagcacacagggcccagcagcacacagggcccagcagcacacgcagcccagcagcaagcggcccagcggccagcagcgcctgtgtacacgcagagacaacagcagcacagtcagcacaggtagcacaagcagcgttgcacgactcgctgcactaacctggaagcttctggactgttggccgagaatccaatcggcggccatgaggttaaatatcagctgaacaataaacctaatactgttgctagaccgattttggttggaagcagtccaaccccgttggaattttgacggtatggcgaacttgtttgggtgagggactagaacgatagtcctggaatcgctgtaggatacggtgtctctaatcaaattatgtgattcgttttcgctgctgctggtatcgtttcgatctccaaccttattgtaaagtgctacgtaaaatcttctctctaaagaactgagtcgagtatcgttgatttttttaagactttttatagctttttgtggacctttcattcttaactgggctgtgatttcggcaaatttaactcttcaataagacgttgagaccgtcatggatagaaaccccgtctaacttgggtaatgccgctgtatgaaacgctaaatgtacgaagatctcgagcaatttatccttaaagttggcgtgttgtcgggcgcctctgtaatttttctttcagttataaatgcaccatataaaaactataaatatttgtgtgacctttatggtagggaggaaagatctcgaatactggcgatgagatgaccgacaaatggcattgttgaagggacatccagttaaaggcatgcttttattcgtaacggacagcaccggagtacttggaaatagctgtaaactcgctttgtaaagtggtttttcagcgcaaaaagaatctaaaatacgtatcgtatcacgcggactgcgagtctgacatggttgacatgcagaacctcctgtctaagcttaaacggcacgcaaaacgaatacctcactgagttaaagagtcacagaggaacaatacggtgtttgagaaaccttcggggtcgctcatgatgattttgtccggggatttaagccacaatctgcgccacaatctacgccacaatctacgccacaatctccacaatccacagtagagatgtcattgtcagcgcctctccggggtagttcgtgtgctctgcgtagctacccacttcgaacgcgacactatagactacaatcacggaccaggtcatactgtagccgttgtggctagagaatttaatcggatgacattcggatttcggattggcatttctgtctcatccggttcaaccggtctgaaaatcgaataaatccggttatattcgaatgcattcggattgtttgacttattacattatggattatccttctatatacgaataaatcagcaatcggctaccacggggtaatgaatgatacacattttttgagtgatcatgattggataaaatcagaatgtgtacaaagaaacgtcccaaaccaaattcggattgcatccggatgaacccggatcagaatccggatttttattgaccggttgcattcggatttcattcgaatgcaaccggttgataccgaattcggccatccttttacattctctagttgtggcagtggcctccgtgcgtgtccaccttcttcaacgtctcctgtccacacatcactttaggcaggcgattgtgttcaccacacaaaaaaaacgttgagaataacgccacgtgaaattgaaggtgggcgagatccggaaaccagctgtatcatgtgtgcaagattatgtggcttgtgtcaattatccacaagcctccttgtgatattgtggcagattgtggttgcttgtggcaaataaccacgatcttgccacaatatcactgcaaatcctagagatgcattgtggtaataagctctgcctcctccaagaccacacggtcagattatgcatgaagtaacgttgaagttcatgttgtgctgaaacggtacaggtgcacacggatttgacgttaaaacactccttcagccagactgctgctgagcaaagcggcgttcgacgatgtacagcctcaacaattcctgtttgaagaagcccagagggatagcgcttgagcattgttttctactgtagggacgaacaaatcgatggtctccgctgcatcgaaactttacggcggaggttctcgaatgcattgtggtgcagcacatcaattcgtgtgtacaatgaacatttgccgtggtacaattgtaatgcaccaagcagaaacttcagaaagcaacgtgtacgaattcgaagtccaactcggacaaaaccaacatagtttttggtgcaccagttattgtgctttgcagataaaatgtcgccccgttttatggcctagatcgaggaaggccggtccacaaatcagggtacaaaacagaggcggtagctcgatttacttagatcgacctcgaattgcgcttttgaaaacgcaaaagggatcgatttaccgtagatcgacctcgttctgcccagatccaccaggtgatcgacctcgagccctgatttggattgtcgtagctcgagttattagctggcctaaatagatcgatctgtccctttctttgacctcgttttattaaatcgacctcgactaatgataaatcgaggagagctccaagtcaaaacgacaaaacgtttgcaaagcacaatacatgtacgagtgtacttcatatccacttcgaacaacgcactaaaacgccagactcatcactggctcatcccgaggctcacgttgcgcgtacaaacgataaacgaagaggaaagcaacacgctcgtgcgccacggccttcaacgtggtgccaaataaatcaagtggtgtgcgcgccgactgactggtgacgaacagagacactcccgcagcgtgcaaagcaggacaatacgtcccggcgatcctaagtcgccgcgaactttaacactgaccccccccagctgttgacgcaatgcgctgagcttgagacttggtcgctgtcgggccatgttgcaggcccacctcaagccagcagctcgccctcaatcaagttctgcggccctctcccaaacatatgtacacatccacccgactcaagcgaatcgcttgaagcgatcgttaccaccacagctccaccgaccgtgccaccgcttcagtcattgtgcgattctccacctgccgcaaaaggcataaccacccccaacaagcaagctctacagctacctcgcttccactccctccccttcgtaatggctgccggcgtcgtggtgaacgtccacaacaacgacgatgacgtcccgaccgagggctcgcgcacctacgccatcatcgtgtgcgtgttcgccgcgctgggtggcctcttcttcggctacgaccaaggcgtgacctcgggtgtgctcatcatggactcgttcatcaacgactactgcgtcggctggcacaacttcacgtacgagcagtgcacgtcgtcttcgtcggacctgccggctgagtggacggacttcacggtctggtacaacatggcgtacaacctgggctgccttgtgggcgccttcatcggcggcatcgtggccgacaagctgggccgccgctggaccatcttcacggccggcctgctgttctgcgtcggcaccttgtgggtctgcttcaacaaggcgcaggagcacggcctcatgtacatcgcccgcgtgatccagggcttcggcgtgggcaactcgtcgttctcgctgccgctgttcggcgccgagatggcccccaaggagctgcgcggcctgctctccggattcatgcagatgacggtcgtcacgggcctcttcctggccaacgtcgtcaacatcatcgtggagaaccacgacaacggctggcgcacgaccaacggcgtggccatggcggcgccgatcgtggtcatgctcggcatcttcttcgtgcccgagagtcctcgctggacgtacctgcacaagggcaaggaggaggccgagcgcgtgctcaagcgtctccgccagaccgacaacgtgggccgcgagctcgaggtgatcggcgaccaggtcgcggaggagctggccgccaacaagggactcacggagctgctcgagccgtccatcttcaagcgcgtggccatcgcgatgatgctgcaagtgctgcagcaggccacgggtatcaaccccatcttcagctacggcgctctcatcttcaaggacatcacgaacgccggcatctacgcggccttcttcctctcgggcgtcaacttcctcagcaccatcccggccatgcgatgggtggacacgttcggccgccgccagcttctgctcatcggcgctgtgggcatggtcgtcggtcacctgttcgctgccatcctgttcacggttatctgcgacggcaacgtggacaacgcgggttgccccaaggtgggcggctggttcatcgccgtgggcacggccttcttcgtgttcaacttcgccatctcgtgggggcccgtgtgctggatctacccggctgagatcttcccgttgggcgtgcgcgcgccggccgtggcgctgtcgactgcggccaactgggccatgggcgccgtcatgacggaggtggtcaagctcttcccgcacctcaacatcaacggcgtgttcttcctgttcgcgggtctgtgctgcatctgcggcgtgttcgtgtacttcttctgcccggagaccaagggcatgatgctggaagacatcgaggcgctgttccacagcggcggccagcagcccaagtcagcaggattcgtggagaccaagtctccgcagcagtcggcggacttatgagcggtagctgagcttgtcgtacacgtagatgcataccttcaaggactaaaatcaaatgacgaacaccgagaataggtccagctggactaaataccaatcctataaatcaccgtacagtaccgatcaacaatggagctggaagccgcgctgaagtcggatgcgttgaccgctttctcccggtcccttgagctggccttaggcgcggccagctcgtcccgagggaaggtagtcctcgccgtcgatgcctcgcagctggccatcttcgagctgctcgcgtacggctcggggggcagcgagttttacgagaagctcgggatctcgcgcctgctgagtgtgcagctacaaacgggcgacgtcgcgcagctgcagcgccaattggacatctccaaggacccgcaggccaaccaggaacaggggaagaagacgctggacgtggctgtggtcgcgccgccgctgcccaccgtcgccaagcggctggccgacgccctccggccgctggagctcgtgccgacccgccactgtgccgtgctgtggctgccctcggccacctccgacgtgacgctggagatggagcgacagggtgtggcgggtttcatccgccaggccaacttggcgttgggcctcatcccagtggaccgcggcgtcgcggcgctgtgtcacgacagtgtcttcggagaactctatgtgaagggggacagcagggcgctgacggacgtcgtcaagagtgtattggccgtggagagacacacgggtcggaggatcttggacgtcacgtgccatgggttcttcgctcagagggtcaagaagatgctggagctggcccatcggcagcagcagaagatcaagatgagtcgagctgcagggaccaaggagctggaggccgatgtggctgcgcccatggacaagttggtagtgattgaccgcatggaagaccctttgtctatgttgctgacgcccatgacgtatgaaggactgctggatgcgctcgtgggcgtgaaccatggcgtcgtcacgtacgagaaagaggaggaggacgcggaggacgctgcaagcactagcagcagtatcaaagaggagtcgacaacgaccacgacgacgcagaaagtggtgctgaaccacctcgacgcgctgttcgacgagatccgcgacgtgaacttcaacttggtctccaaccagctcgtggatgtcgccaaagacttggccacagaagtgcggggcagctcggccgggtccagtgctgacttaccaaaggacagccaggcagcgttccagaaggtgaaggctctcttggccaaggcgccgcatttggtgaagaagaagcgatcgttggcccaccacttgcagcttgtgcagcgtatccgagagctgagcacgcagcttgcactgcgtggatgcgtcgagacagaaatgaccatcatgagtgctggcccgagtgcgtcatcagcagcggccaaggacgtggacagctttttggaagaggctatcttgcgtgagcctccgctgaatctctacgacgtgatcaagctactctgtctgtgctctctcgtccgcggcggacttaagccagacacgctggcctggtatcgccagcagctttgccatacttacggccaccaaattctgccgctgcttgtgcaattggagaagatggatctgctctctgtcgagaaccgcttcgacttccctaaaatgcgcaagcagcttctgctaatgcgcggtgctctggatgacgaggacaccagacatccttcggatattcactttatgttcccctacacgggttacgcgccaatgagtattcgcttactacaagaatcgctcggcatgaagtacaagacgctggcgaaggacccgacatcgtcactgctgagtctggggagcggaagtgggaacaactccagcagccaccacagcatgtcgtccgaggctgcttccaactatgacagtgcgaacggcggtaaacgcaccaatgtgctggtatactacgttggcggtgtgacagtcgcagagctgacagcgttccgcttcttgaaccagaagcaaagccactttaccttcttcatcgccgctacatccatctgcaacggcagtcgccttctgcgtgccatctactgagcagaaagaaattcacaggtcggaagacctgtgcttggccccagcaaaaaacttgtaactttccaaaaccgggtaccaaaccgggtctctctttcttaattttaatgtttaagctaaaatctgccggaatcgggtaccccgtcgataaatgctaaaatttatgcacattatttaccaaaggtggatactaatcgtttattcttgaccaaaacctgcactggcaatttgggtttaggtttttccctggtttaaactcaaaaacctaccagtcgaattttgctgggtcttaggttcaacttcatcaaagttactacttactgcgactttcctcgttgcatctacacaggatgctggtatactacatagatatattgcggcggggcgtgttttagccgagtttggcttattacgatcgacgtggggttgtaaccattcccacacagggccagtatgccctgtgtgggagaacgccagaggcccctgatttatgattgaatgacgctgctactctgttatcagtcaaatgaagctttaaccagcaacgaagaacggggctaaagagatgcatccgcacctgtgtctcaatctggatgaagaggaatatgggggaaaattggtgattttcaattgaaatctgtcagccatgaacacaatcagcaataattgcattctgtgcgtgcatccattgcatttggcaaaggcattcatgagttgtgcgtgcgcctcgatgcgtcaacgagcacctttatcgaggcttacaaagtcgacgctagtgcattagcagcgatgcatacgggttcgtcgtacataatagaactgacgatcacgactagccaaggcgaacccgtgcatgcgtatcggacctaaagaaacggatgctgcatcagtgatgcacatcggaacgaacaacaacatattaattagtaaggtaagcaccttatagatgcgttggggtgaatagggtgatacatcagagtgagtatgacagtggacgatgtctggtttaaaaccagtaaaatcagtttaaacctacccaaaaacccagaacctaattcattttttgaaaatcaacaggtttttccagctctggctctagtacagtatgagagcgtcatggcttcgctgaaggcgtatcagtttgcgccataatcgactaagcttagctgaagatgaccaacatgacttgctaggtacaggctgcattttttacatgtcaatttgctcaatacccaatcactcttagccgaagatgcccaacctcgtgtctgtcgccaaaccaatcagctcaactcgacagtgacacgagcatcgttcgtttgaacaagactttttccctgcgttgaagcacccacttccaaggaattggccattagcgtatatctcattccgcaatttatcccccaaaccctcaagttaaaagtttgtttgtttgttttatttttgaattgaggatcattattgtcacttagctaacatcctcaagttaaatggtcaagatcagcgcaccatgcgtctctccttcgtcccgctactgtagctctctcgtctgatcgttagcacacaacagtacaaaaatgggcacggtataccttacctgcaaaatgaatgaaatacactccacgacaaaaagatatggacaccaccaaaagtggctgtaacttcgtcattttttatcgttttaaggtgcggtttggactagagttgcagaacacgctgaaaaagatctgcacgctgctaacacgcgcgcttttgcgcttcttcgggtagctcacatacaaatcactggttctgcccaggtggcaaaacttatagacagctaatccccatacaaaatcctatataaaccaaaaccccttacaaatgatacgaattggactttgtatggggcgacaaaggaacccatgatttctccactctaccttagtactgagccatatatcatctaccaacagtttagaatggagaagacaatcgtatatccatgagatagcagcatacagagctacaaattgacactaactagtatgcaactgaacgtgcctcgcaaatcatcagataatacatggtagccaccactcgaaatttcaattgctaactacttgctcagttttgtgcgatggtcgatgaatttattacaggttactaaacacaccttctagtacacgataataccatcagatatttgtctaacgtcacgagtatcccggtgaggctggttctttgtcgccccatacaaagtccaagtcgtatcatttgtaaggggttttggtttatataggattttgtatggggattagctgtccataagttttgccacctgggcagaaccagtgatttgtatgtgagctacccgaagaagcgcaaaagcgcgcgtgttagcagcgtgcagatctttttcagcgtgttctgcaactctagtccaaaccgcaccttaaaacgataaaaaatgacgaagttacagccacttttggtggtgtccatatctttttgtcgtggagtgtagctctctcgttgctggcgccaacgcagccaattggtgactttcggttcctgagaacccaccacgataaagaagggcggggcttgctggttaccagcctcacaaaggtttggctgaaacagtatcgatacacttcgatgtgcgcaactatttgttcaattacgcattctcgggcaggcgcagtagatgcccacgttagaatcaactagagagttgggctggtagtgcttttaaggattaaaaacaaaacaactttgggatttactcaattattatccgttatcatgaaactattcgtcgacctgtgtaccctcccggagcaacgctccgggttgcctatgcaaggtgagagagatgaggaacttgtaaatcaattgattcatttttgttctcaatggcgttattcacaaccattagcctagtataggagacaacaaagcaagcaccttcagctgcagcgtgatccacagcgaccggaacagtgtgacaggtaccttgggtttttcgtagtcgtctgggatcctctcttggatcaagaacgaccgagcgtggtcgactgagatgctggtcgtggcctcatcccccatgaccagcagcatgaccgcggactcggaataggacgtgagagctcgttgggcggtgaatgtctcctcgaagtcgggagtattagcggcgctctcagcctcacgctcgcgacgatacgcagccaacgtcatcctggtgatgcactgatccttgttgccacgtgcaagcagactgctagccaacgtcatgttcacggaagacgggtccgttcctatgcatgcatcatcatggacgagcgaggcatcgtgctccacaacgttgtgctcacccaggtcggcgagcgagaacttgtcggccaaagtgctcactagaaactctgctagtgactgatccaggttgtagacctccacaagggcgtcttgaagcacgtgaggtgtcacgttcttgccatcgcgcgggagatacccgtggtttgccagggcgttgagtgctgggcacgggctgcggtggttcttggctgggttacccttgactcccgatacgtcgtcgccactcggtcgaaagtacttgtgctcccacgtgaggtccaaatgctgtggcacgaccaccggaacatggtttgaggagaggaaggcgttgagcaccgctgcgactagcagcggcaccaagacgaggaatgccgagttgacggtttgtttgcccatgaccaggaacgagataaaatgaagagtgaaccaaaggacgtggctgggaactgatcctgggttgaataccttcgctacgtacgtgggatatgatcaaggtaccagatcgcacgggatattttcaaagtggaccatggactcgcaatataggcaagacactgcccaccttagccaagccaggcccggagtttgagctctgcgatggcgagcagcacgctcgtgatggtgattggcgtcttggatggacggaagtcggcggggattcgttcatcaacgaggaacgagcgcgcgtgctccaccgaaatggtcgcgctgttgaagtcgcccaggccttgcaagaggaaggacgcctctccgttggccacgaagctcgccaaagcactcatgctgaactccgggttatctcgggcgcactcgacctcccggcggcggcggaagcgggccaccgcgtgtttcgtgagagcacgaccgccacggtctccgataacttcagcactcgccagcagctcgtccactagggtcttgttgactttgaacggtgccatttggaagaacgagtcgtcgtggaccaaggacgcgtcgtggtcgatgaagttggggtctcccaggtcggcgagcgtgaagttcggcggcatcgctaggaagatgaggtccagcagcctcttgtcgaagttgtagaccttcatgatgccttcgcccaggatcgctggggtcagctccttcccgtcgcaggggatgtggccatggttcgccagagtgttgagcgctggacacggactgcggaagtacgcgaacgagctgttccccgggagcccccagacctggtcgtctgcaggtcggaagtattcgtgcgcccccgttgtcagcgactgaaacaccgaggacggagtcgagttgtcgaccaagaagagcgagttgagggccactgcgatcgctccacatgtcaatgcgaccgacaacgttgcggtggtcttcatggcgagatgttaagccggtcgagcgaattcgacaatggacgactgcaaagacggtagcgcgaattgagcgcagcagctccatatcgaccattgatggcaccagccagtctctagtgttgtccatggagccgtgcgtaggctctagattgtattcgattagattaatggagaagagatgcatgcacgatggttctacggccagacctaacgctatagacgcaacttcgaagtctagccggctcgctgtactttacaaatgagcgggcccttgacctgcagcagcgacgctacgtcgtacgtgtagctcttggggttctcgcgcgttgtgaagtggtatttgctgagcatgtaggccaggacagtcttcatctctaacatggcgaaccgcatgcccagacacgtgcgcggcccggcgtggaaagatacaaactggaaggccgacaccggccggatggtttgctcgccagtccacggatcctgcatgagccaccgctccggcttgaacttggatgcgtctcgaccccagacgctcttcatgcggcccaacgtgtacgacggaatgtacactcgcgtgcccttcttgacgaacgtgccgtccacgagcgtcgtgtctcggtttgcttccttggcgttgagaggcaccagcgggttcaggcgcaggttttcgcgcagcacggcttccagatacacgagaccttccacgtcatccatggtcggcacgtagctcgggtcgctgaacaacttgggcagcttctcgcgcagctcctggcgcagcttcgtctcgaccttcgggttgcggttgagcatgatgatcagccacgacatggaccaggccgtcgtgtccttgccggccagcagcaccacgacggcgatgtccctgaggaagttggcgtccagcggcgtgtcgcctccgtcttcgcccgccgccttctgctcgtcgtgcgcgtccagaaacagcgatacgacgtccttggtgctgcgctgcggccgcgggggccactcggccgcggccgcgtcggggttgaacttgcgctccatgttcttgttgatgatggtgaagaccatcttgtccaggatggccacctcctgggccagctccttctcgctgccgagcttgagcgcgcgcttgagcttccagagccagtcgggcgagtggaagcgcatctcgatgttgtgcacgatcttgcccatggcctccatgaactgcgtgtgctcgccgccctcgagcgagttgccctgcagcccgaacgcgatgtccgtgaacacgtcgaacgagaagcggtgcatgacgtccgcgaagtcgatgggcacgcccgtgcgcgccgcgtcgcccagcatgcgccccagcacgagcgtgtagtcgtgcacgcactggctgatggtgtcgcggaacgcgcgcatggtgaagaggcggctcagcatcttgcgctgcgcgacccactgcgggccgtccacggccacgatgccgccgcccgcgatgtcgcggaagatggtgttcatgcggtcgcccttgtcgaagacctcgaactgcgtcttgagcacgtcctcgaagccctcgacgctgctcacgaccacgagcggcggcgcgcccacgacctgcaggcgccacgtgcgcccgccgaaggccttgcactgctcggcaatccagtcgtgcaggcgcggctgctccaggctcatcatgtccagcgtgttgcccagcacgggcagcgtcgaggccggcgccggtagccgccggatcgcgcgctgccgctcgtcggggatcagaaggtacgcgagcacggcggcggccgcggccgtgggcagcgccacccacagcgccaaggaggaggacgaggacgccgaagacccgcccatggagttatctatctatcgagcgggtaattgcgttgtggggtggtgagcgaagcgattgacgcttgatgttgctacattgcgtctctttggcgccggatacttgggtgtcaactagggtctgacacatggatatgtcgcaaaccctagttgatgtgcttccacttcaacttgcccattccgtgggtccagtcattgcgatcttccactccagatgactgaaccgcggctgtggctcttgttggcgctgctcatgttctcccgcgcgtgctgcgcccgtccgccgagcaacctgcgcgtgcacacggcggccgacgccgcacagacggccggctccgacgaccaccactacgcgcgcccgtccggcgccgacgtctccggcttcccgccgcccaactccgccgccaaccaccgcagtccgtgtccagcgctcaactcgctggccaaccacggctatttgccgcgcgacggcaagaacttgacgcccgagctcatccgcaacgccattgtggacgtcttcaacgtggacgagacgctggcggagcgattaacgcgcccgctgccgcagcagttgacgctggcggacctgagcgtccacggcttcatcgagcacgacgcgtcgctggtgcacgacgacacgtactttaagggggacccagcgcacattaacgccatgctggcggacgctttgttcgctagaagtaaggagggaaagttggataaacattccatggcgacggcgcggcggcagcgagaggcgcagtgtaaacatgataacccggagtacgctctgcccgtgaagggccaagctgcggcgtatggtgagtcggcgctgctgctcattggcatgggggactacgagtccgagaccatctccgtggagcatgccaagtccttcttggtggacgagaagatcccccaggggtttaagaaaagcgacaaacctatctcgacggcgacggcattctatctggccgcgcagattaagctcttggcatcacttgggtggggaggagtagcggagacggagtgacggaacgatgcatcggttgagattcgtgagaattgagacgaaattgatgttttgcctggcttaggagctgtcattgtgttttacgacgcagtatctcagcattatacgtgtgcgttggtacttcatacgcaaatgaagccttgcatgtactttgtcaaggtaaggtttcaccctctttctactgatctgctaaacgcgaaacgagctgacgcgaagatacagttgaacagatttattggagtcaacgcgtttcgcgttacgtgtcgggaggctaacttggccctttcgtcctgtcattttgtctttcgctcagcggtgcacactgacggcagctacaaagcaccatcatgcgtcgctgttgctcggtgccactactaacattatggagtgttttcacgcttccctcagctgtctggccaatggatgggggtccgagataacgagctcgaccctctcaagccattccggtgtatcagccaagaggatgttacgaattgccagctacaccgtcagcgatgaagagagggtgcccggcacttccagcctcgagagcctcgtgggtgcgttcaaggcactaaaagtctccccgcagacaatcaagaactggatgaagaaagggaactttgcggacgaatccttcgaggccctaaagcttgacaagacacttgatacgctgatcgataacccgcagttcaccgcgagggtcaagtacgtggacgatttcaacgagcagcacccaaagaagcaactttcgatctaccgaaccttgaaaaagcactacacggatgacgctttgctccagacgattgaaaaggcgaagttatctccggagacggagaggatcgccgcgatactgcaaggcgaacaactccaagagtggtcgcggatcggatattggcctggcgccgtgtatcgctttctgttcaagcagcactcctatgacggtatttttgcgagcatcaactggaaaatctggaccaagtacttggacgattataatgcgatgcattctgcgaaacaggtctcgatgtaccaggtactcaaagctcactatgctgacgaagggttggttaaagtgcttgaaaaggcggagttagccccagagacgaagaagcttgcctcgagattacatgctgagcagctccatgactggcttagaagcgggtattcgcctgagaacgtctacctcctcttgttcaaacgtcgtttgtacgaagatacgtttgccagtccagcctggagcacgtggaccaagtacctgggaaattacaatatgctgtaccctgaaaagaagatgactctgttcgcggcactgagagagctgtacactgagcaccgtgtgctgacaatgatcaaccatgctaagaggtcaatgagtacgaaaagtatcggcctcaagttggaaaaggacagtctcaattttggctggacgaacgtcattctccccgtgatttgttcagctcagcgtttcagctcagtacggcgggaacgaagctcttcgacgatccgaactggagcacttgggtcaagtacgtcgatgacctgaacaaaaaatacaacgagcacacgttgatggccccgatactcacggagtattatggcgaccaaggcttgtctacaattctggaggctgccaagaagaaccgcagcacggagaaactcgcgtctagattgcagagtcagcagttccgggagtggctgaacgagggccattcgccagactacgtcttctacaaagtgctggatattcagacgacagacaagctcctggaaagccctttgttcaacacgtggcacatgtacatgcactactacaacgcgaggatgcccagcaagcaaattactgtgatcgaggcattgtctcatcagttcttccccgagtcggtgtgggaaatgattcaatcagcgaaatcggttccgaacacgaagcacttcgcgaatagtttggaggcgtcactgcgaaacaaactgctatcggagaaaatggagcccagccaagtcgcaatggcgttaaatatgcgctcgacggcggatgacgtcttcttggaaagatacaccgcagagttgaggaagttgtatggctgaaagtcatgatgtgagagccacgacactttgcagcagctagcatagaattcggcggttacatgagagagagcgtaacaagtagttgtatacaagcataacacagctctagcgttaaggcccattggagcagcattaattttttttacatacgactgccgcgggtatcgctgcattcatatcgtttgacacttccagcgtcgatgaatctcgtgaatgcgtacttacaaagcgattaatgcaccccctagactatcaaaggctgaatgaagaaaggaactttgtggacgaattctttgaggttccaaggtctgatactgtagtactcgtacttcgtaagacatttagcggctgaaatgatgagcagcctgctcatcaatagcccgcagctcaccacgttggttcagtatgcgcacgatttcaacgagcagcacctcaaaaagcaaatctcgatctaccgaaccttgaaaagacacgattgagaaagtgagggaggctcagcacaactgcagcagcgaaagcttttactactagtatacctagcggagcgctactaagtactactcgttctacttgaatggtactgcgagaatgagctcgttggctgtatgcaaaccagtctagtgaagcacagggtaaatgtacgtgtcgtatgcgtccttgaaagagcagctctcatcatcgcgggaccagcacacgtgcgtcacgttatcggcagtcaccaagaacaggccgccgcgttcgtcaagcgtgcgaaggccaaacgtgtccgacgtgtactcgagcgtgtccttcatgtcgacgaccgagaggctgctgaagttcgtctcgatctcgttcaccgacttgacttccgagtatcgcccgaagatcgacgactgccacggcgtaatggttccatcctcgggtgagatgaagaagtaggcggactcgagcttcaagaagttggtcttgcgacgatgctggtcgtagacgcactggccatttccaggcagacacgggttcacgttgttcaggacgggcaggaagatgttggaggatgcccagcaaccgaactgtggggagcgctgcagattgaagtacgagtattgatactgcacctccgggttctcgagcgtgaactggacaatgtcgcgctcaagtttcccgtagacatcctcggacgagtacttgctgaagttgtagacctcggccggaacgatgaagttcaggtaactgggtcctgaagccgcgagtgcgtccgcatcgtcgggtccgttgaagatgccattctgaacgccggccaagctgatgtagcgtttcacttggtggtcgtccatttcctcgatcacagctcgtgagatggcgccgccctgtgagtgagtgatgaagatgtagccatcgtcgaacacggagttgttggccaccgtctcccgcacggcggcgacagcgagcgggacttgcttcacgagagactcgaacgagcaggaggagtcgcagaaggagagcgacacaaccgtgcggccttcagcagtgagattcgccacgtagttgtctccagcggtgtagtcgtcggagaggccgtggaagaagaagacaggcagcttgacacatcggtggcggcgacagcgctttggacagtagcggctgctagtccgaggagaggcgcgcagagcttcatcgatggcgtcggtggggtgctcggtgttgattcacggtgcggataatgagctcgaggtcattgcaacaacgctggttgggtggatactgtagaacacttgaaggttcaaggaccaacccttcccggtgcacgaactccatgatgacactccgtcgtctttctcactcggctaaattggcgagtatgataggaacgttggagcggatctctcagctgacgcgaccccacttcaagagccagtattgcctgcttcccgtaattccagcacaaggcagattcttcaaccatgtatctcgtcaccacagaaaaccatatgaacacacacaaataaagcctacgagaaccactaatcttgcaccaggtaggataccttacccagagactgcccagacagcaagcaaatctgtgacgtgtggccaacatgtatccatgtaccgtaaaatcggtacgtttttgactcgtacttagtcccgctatgagcttcatcgccacgcacgtcgcctctcgacctcagatctgctggcgttagtgtcatattgctgcccatgcgtccgtcgctcgtgctgcgccgcgcgcctcgcgccgccagcctcctgcgcagtctgtcgacggcctcttcgtcctccggcgctgcgtcctcaagcgccggctccacgacgcacttcggcttccagcaggtgcctgaggaggacaaggagcggatggtggcgtccgtcttccacaatgtggccgagcggtaggcatatgctacagaatctctaattttatatcgatatgaccgaatacgtttctcatatcttgttatgacgacttgctagatatgacgtgatgaacgactttatgagcggcggcatgcaccgcgtctggaaggactcgttcgtggacacgctgcaccccgtgggacctctcaagtgcctggatgttgctggaggcaccggagacatcgccttccgtatcgctgagcagctggccaagtcgcccagaggcgtcgagggctcggagatcaccgtgtgcgacatcaactcgtccatgctgcaggtgggcgaggagcgcgcccccaaggtgctgccccacatcgacccatcgctcttccgctgggtggaaggcaacgctgagcacttggactttgaggacaactcgttcgacgtctacaccatcgtgttcggcatccgtaatgtgacgcacgtggaccgcgccatcaaggaggcctaccgtgtgctcaagcccggaggccgcttcatgtgcatggagttcagccaggtgcccaacccgctcattcgccagttctacgacgctgtacgtgggtgaaaggggggagactgttgtcgttgagctggctgggttatgactgtatggtttgcgttgtgacgacagtactctttcaatgtgatcccgctgctgggtgagaaggtcgccaatgaccgaccgtcgtaccaggtaaatgatcttgttgtacgtagggggtttgtagagatattgtcgttgctaacgtatctttggtgttgttgttcgcagtacctggttgagagtatccgccagttcccgccccaggagaagttcaaagctatgatcgaggacgccggcttcaagcgcgtttcgtacaccaacttcacgttcggtgtgacggccatgcactccggcttcaagttctaagccgttcacatgcgaggttactaactcgatttagagaattcgatgcaactgaaacaaggtgcctgcgtttatcaacagcaagttcatcagcgacgcagcttatagcagctcgcttgatataggaatgcatatgtgaacacgactcgacagaggggagaacataatcgattcctaacttttgctcgccttatgtttgtgcagctcattttaggtctcgctcgtctacatcgccacctttcaacttggcagtcaaaatggcgcggttgtgacgtgagtaggagttttgagggtcgagtgccagcacctgcgtgtagtcggctatggcttcttcgaaccgctgcatcttggcctgcgagtaggctcggttgcttagggttcttgtattctgtggatcaatggtgagtgccgtcgtgtaatccgcgacggcttccttatagcgacgcagcttccgaagagcatagcctctgttgttgtaggcggcaacgttgcgcggctcgagtgcaagtgcagcgctgtagtcgtgaacggcctcctcgaagcgccccatgttccgaagacagtagccacggttgtggtaaaatacggcgctgcgtggatcgagtgcgagtgcctgggcgaaatcctgaagggcttcctcgtgacgtccgagctggtcgtagcaaagtccgcggctgttataactcgacacggagcgtggctgaagagtgatagcacggtcaaagtcagcgatggcccgggtagtgtctttcatcttgtcgtaagtgctgccgcggttgtgatacgcgttggcattttctggctcgacgcgcagtgcagctgtgtagtcctgcaccgcttcctcgtagcggcccagcttgtcgtatgagtacgcacggttatacagcgacttgaagtgttccgggttgaactcgatagcgcgcgaatagtcagcgatggccagctcgaagttgccctgcttgcggtggcagaacccccggttgtgatagaagtcggcgttggtcggtagcagctcaatcgcgcgggtgaaatcagcgagagcaccctggtaatcaccgctgcgatctagggagattcctcgattgtagagtgcgaaggcattatgtgggtccattttcaacgcctgcgtgtagtcttccacggcggcatcaaaccgcctcatcttgtcataaacgaagccacggttgaagtatgccttaaaatgctgagggtttagctgaatcgctcgcgagtattcgtcagctgcagcctggaagttgccctcctgccgatactggaaacccctcgcgtgatgtacctccgcctcctctcgtgcagacgcagtgaccgacgtggacgttgctgccgctttgctagcagatactgcttcagtgggaagtgatcttcgtcgatccgaaggagaaaacgaggataaagctggggatggaggcaggagaattgcactgcgtggtgttggcatcgcgtggttttcactcgatgctgaactagcctctgagaatgcatggcgtgaatcagcgaatgaggagaatcccaacggagcagcagtcttctcttctcgcggtccaccttcatcgttgttgtcgctttcaccatctgctgtcttttgtagtttcaggttcgacttctttaatcgctgggagaaaatgaacgcgttgctggcattctcatcttgctgctgcttctggcgttgcagttgttgccgtgttagtgtcgccgaccgatgcagttcctgctgatgtttctgctgcagcttcagcttcttgtccttcagcaacgcaaagttgtagtcatcaatcgctcgaacgaaatctccctgtgagttgtagcacgacgcgcgggcatatgcagcgttcacgtgctctgggttgatttgaagggcccgcgagaagtcacggatcgccagctccactttgtcgagcttcgagtatgccagccctcgtgtgtaaaaggcagcggcatttgcgctgtcgagagtcacgacctccgtgagatctcgaatagtctgttcgtagttcgcctgcttaaagagcgcttggcctcgagctagtagtaccttcacatcttttggctcacgtacaagaagacttgtggatgtgtcgatcacatgctgcagatctgtaggctggcggtagtagtaggtccggttggggtggctctgggccgccttttccttccctagaaagtccttccgcttcagcagcacaggcttatcgcctagtgtctccacatccacttcaggcttggtcgccatgctcgggcttccgaaaaaaaagcaactgcgccaaagcacgagcggaagcctgtcgtttcaacttcgtttcagcttacagataaatcgggagtagtcccctgcgaacaatctctgcaagcaaacgcaatcggccagtaacaaagcctggtcatatttctacataattttcacagccactggcattgtagtcactgatagtctgcactctaatcgtcttcttcagcgtcgtcttcgtcgcttgagtattggccatgaacttcgtaatacgtagtatcaggaagctccaacaaatagccaagatcgtgagtcgacaagatcgagccgttgccgtcttcatcgccgctgtcaccctcgatagcaaggatgtgtgcagcagcatcttcatcgtcatcatcttcgctcccgtcttcatcttctgtatcttcggcttcttctaagtcagaatcggacatctcttccacgtcttcatcagtatcttcttcatcttcgtccatattgtcgtcttcatcactagagttttcatcgtcgtattcatcgtcgtccagcgtgtcggactcatcgtcaccgtcctctgcatccgagtcgtcctccgctgggcgttttctgccgacgtcgtacagacggcaaatcgaatcatcatcgtcgacgtcaccagcctccaggtagcgcccttcaacaacagatagcagcgtgccattggtgtttaaactaatatcaaacacaggtcgacccagatcgatcgtcgtgatatctttgtagtctcgcgagtccaaaactcgaaaccacgacttgagcttgctttttcggcgctccagataatcgccctggtagaacagtcagaacaagtcagtgaccgtttgcacccagctatctcaagcagaattgtacttaccccagcgtacggatagtatgcaaacaagacactaccggaaggattgaacttaatggtgcacttgtccaacgccggtaccatgcgcaatagacgatatgtacggaggtcccatactgctgagttgacgatcacctcgtttccgttagggtggaaaaagccacaaccgacattggataacttgtcaaacttgtacaacgcgcgagtagggatacgggcatcccaaagcattccatccgtgagaatagtcccgtcacaaggcgagaagcaacaattagtttctgctccgtagtcattggagcgcgttgcatctttcaggtcgcacagaacgtctccagtagcgatatcgagcacaacagcacctttgacagtgataccgaggttatctaactcatcctcttcgtccacagggcgagcgtcgagtgcaacgatccgatctccgtaatggttaaattgaggtcgaagcccgcctttaaatcgccaacgctccactagcgcactcatgtcgtttgcttcccacagtccaatttcattcacggcaagctctgagagagcgactgcccctgttagaattaggcgactttgggcgccaatggacgtcgactcattcgtttccaagtcgacgattgcgcttgacggcgggtgacacgtccattcttcaacgacttcgtcagacccgatattgaattgacgtaattctccgtcatggttggcaatcagcatgtcttgctgatcttttccgaagaaccgagcgacactcaccccaccccaggcgaacgatccaacgtgagcacctacagtgcgatatggccggtatcgactaaacacgtagcggtcaattccggcatcagcgtagtacgttgaaaaggcatgtggaccagcacgataccccgttcgacttcgacgcaataaccgcgaacagatgctcaagttcgacgacatatttgctggaggatccggacaccgatgcaacgaacctttacccagcagtttaaacggcggcactgttgtaacagggttggcgcactggcggtgttgttctcgcaagtaatgccttatgatatcgtccaacttgctcgatgcggtcaccgctgtagcttcgccatttgcactccatcgcgtattaattgggagtttttgaagagcgtcagagcatgatgtccccgagacgagccttggggaagttactgactgcttgcacgaagtatcttgaaaaagatgtggcctggagaaagcctgacgcattcgtttcctcgattggcaataaggagtagctggagtggcggcgttaacttttccatctaccggtcgggatattttcactgatagacgagaaccctgagcagattctgcaacctgaactttcttcagctctggcacaatcgaacccaacgatgaaactcgctgcagttttttcgggcgcggtgtgtcatccccgcttagatacccactttcgcgtcgacttgcaacgctaaggggcacgtcttgattagcaactatttgcttcttgtgtggtgtaaagctcgtctgatctgaagaagctgttccaccattaaccaggcttggttcagttcggcaatcgccagccgaagacactttcctttgcttctcaacgtgaatcttggcctcgtcaacaagagcagatgcagcgtgatgcagtcctttcgtgacgagatggtcgtgaattagacgcagtaactcattctcgtcgtaagtaatcttggtacttgcaacgatgcttgccttttcaattttcctcacagtagggtccgttgcctcgttgatcacgacgttggacgctcgatgcgtcacgtgagaaatcaaatccaaggcagattcccgaaagcgcacgtgaatgtcagcgttttcctccaaaactggatcactacgaatcatatcggacagtagttgcccgacctgcatcttctcaagaatttgggaaatgtgccggtcgcgagataaccccagcagcgcacgcgtcgccagaagtcgaattgcatctgcattctgcaccgaccgcttgtaccgaagtagatagacacacaccttgatcgcatttctctccctcgccaattttcgcacaggccgcaacattttgtcatctttagctttagaacagcagttcgaacagttatcgggcgtagccgcgttcggtccttggtctgttgtctccgagcttgagcgttgcgcctggtcatctttcttcgttctcatgcttctagcagtcaatgtgtactgccggatgtctttgtaagggtgttgccaacagtcttcgtggtgaggtggagacacacaattgcagaatactcgcagcgcatcccgaaccaactccgagtctcttggattgctgctcattgcaatttccagcagaatcgccatcccaagctgcttggaagtgctaccctcgtctaaggatacttctgtcgagcatacctcactagccaaagtgggaaccacgagcgtcagaacgcgaagagagtccaagcaaaattgtgcgcgttctccggtccatatccgtatagtcgaggagttagcatccggatcagtattttgcattactgagcacatcatagccacaacctccaaaagcactaggatgccacgcaaatgactgagttttgcggcgggaggccacatcccattgcctggaccggttgcagcagaccatgaattgttggagttgccactgcttgcactgaagcgatatttctcgtaaaacaccatattttgctcgtgagtcttgtcgtcgaggtcgattgccttagaccagttaattttcgggacccgagctgggattcgagacgccgcggttgccgccgttaatactggcgctgtgtttgactgccgatttgacggatggttcagttgtgcaagctttctccggagccgatgcgtcaccatagccatatgcatacgcacgtactgacgcaagcacaagcaggcatcttgagcaagttgtctttgtgccactgatttcgggtgattgcccactcggatgatattcaggatagtgtacagtccattgtgcttctcgaagtagtccagaatcgccttgaaccccagcgtcaagctgaaaaacaccacagcgttctgtcttgcacggtcattcgggctggaaagcagagtaaacgcggctgacagcatgttttccggactcatcacaaccaggcgctcaataactgcagacgaagatgcaaatccgtgaaggcacattgaaaggctgcgatccagcaaaccgacttggccagctgcttgctgtaacttgaataccgtgaacagtaggtctactccccccgactcaacaagcgaaaacgaaaacttcttgtgcgcgaggaaatgcgacgttagcgtcatcgtgtgcgatatcactgctggattcttgctatgcaagaacgtgatgacggtcccaacgatgtcttctttcagtgctggtgcaaaaatttccagatattctcccatcgatcccagacaatccagagtgtacagcaactcgagcattaccagacgcttgaagtcctcttcatgatgctcaggacgcggcatcacgaccgacccgtcttcaaatccacccaacacgtcttcatcgccaccggaaattggcaatgactgctgtatcggaacggccaccgccggctcctcctcttcttccgcatccatgcttgctgtagcatccgtaccttcgccatgctcgttgccatgtgctggtgcccgactgccaatatccgagtgcttcctcttcagcgatctctgcggtgttgttgcttttgtcgacgtgttgcctccaccacctgtagttttcttatgacgagacgaagccagacgcaagtggtcctggatatacttgaccgcttgctgccgctccttctccaacttggacgcgtacatcctggccctcttcaacaatttaaccggcgtgtcattattcaccaccgtgtccgcaaccgagcggtctctcaaccccacagacagcaaccccgtcgcatagcaccgcagtcctggatcgctatctgtagcaaagccacacactcgctccaacatctcctcatcgtcgtccagcatgcgcacgatcgctcggctattgaccggcaccgtggccagtagcaaccgacacgtcgcagccttgacgcggttcacactcagatccgacagcttcccctccagctaaagaccacaaagtagaacccaaatgagtcatatgaacgtcttccctcctccaaaagggcaagttgagctgcataccattgggtagaagtcctcattctgctccagcacttgcagcaggttcccaatgaggtggcctatagaaaataaaacccaaaagacccacgtcaactatccatcgtcctcacagcttcaacttgtgggtcggatcttaccgtcgcggcgatacggggacgatctctccttgcggaagttggtctcgacctcctccagcgtctcagcgatcctgcaccacccattcacccatatgacgtcatcagtaggtccacttccacggcgaaaaacccattcttggggtctcttacatgttgagcttggtgatgacctcgtcgtccgagagcgcgggcacctgcgggtccgtctgcgtgagctcctgcgacagctggaagacgcgctcctccagcgggtgcagcagctcctcggcgctcaccacgaccgtctcgcggtgcgagcgcggcgacggcgacggcgacggcgatgccatgggcagatcgcaatgtttgtttcctttccgctgccaaggtaaagtgaagctgcaaaaagccaacatatcactcaccagagggattcgtcttgctttctagaatttttcaaaaattcacctcaatacaaatccgcactacatggctacatattcctgtgcaaagggcgctgggtatcacttgtgaaaggatcgtcaccaaccaacactcctgcagttccgcaatatgtccttctcgttcaacttcgcgctggatggcgccactgcggaggcgtctccggcgcccttggccccttctcccgcctcttccggcgcctctgtgcccacgcgcaatggagagcgcttcgtccattccgcgtcttcgtcggcttcggcatcgcccgccgccttctccgccgtccaagtgggcggcgacctgagcttcgacatcgtcaacacgacggacgccggcttcctggcgcgcacgggcgccatcagctccatcctgagcacgtcggacgtgcagacgggcgtgtacgagggcggcttcaagctctgggagtgcgccgtggacctggtgcgcttcgtggaggcgcagctgcggcaggacggcgcgcagatgcccccggcggtgctggagctgggctgcggccacggactgccgggcatccacgcgctgcagcgcggcgcccagcgcgtggtgttcagcgactacaacaaggaggtgctggaactcacgacgagccccaacgtgcgccgcaacgtgagcgaccagctctacagcaaggccgagttctacgccggagcctggagcagcatgaccgagtacatgagggacgtggagcacctcagtgaggaccagatgcagttcgacctcatcctgacggccgagaccatctacacggaggcggtagccgtggaactgtaccaggtgcgtgcgtcatcaggttggtgagctgggctttcttgctgcatgactaacgtgacctgtgtaaaatcaatgcatatgcagacgatcaagaggcatctgcgccgcgtgccgcacgcccgcgcgctggtggctgctaagaagtactacttcggcaccaatggcagcgtgcagcacttcgtggggctcgtgcaggctgacggagtgctccgggccgaaaccgtatgggaagagcgcaactgcagatctaatattcgcgagattgtgcagctctcttatgcggcctaaaaggtggggggctttctagatggcggatatctcgaggaatgagattcaaacgcgaatgaatgaagcgaaccattttttgctgtctgccagcagggtttctggtcaacgcactctcaaccatgggtggatccaacgagttcactgacaaggccgacgtctgctgctcgcatcgcttgccttcctacctgcctaaatttagatggtcgtcgtcttctctcggtccgtgaaaatacctcgccaaaaatgccaggctctcttgccaagtatttgctcgcagtgggcgtggccgtttcaccggtggcgtgcgctgtgatcaggcattcgggcaagggtagccgcccctgctgcacgactctattgtccgcgtcaatcgctcctcccacaaatttggagcactcggcaatagtctgttcactggaatatggaggggcctcctgtgggcagcttggcgctgagcggcgctggctatgccctgagcaaggcacgggccagccgtccaacccggccagcgggtaggatgccgcgagcgcctcctccagataatgaagcgagcctggagcctcagttgacgcccaagatcacgacggtggaggcactgatcaaggagctgcgcaaggtcacccacgcgatgttctgtacggtcgacccaagtattccgagctcaagcgcctacgagaactactcgcgccaagcattccgtttcttcacgactacaaactccatcacaccggaatgctttcaccacaaggttgtgcggctcggtctgcacgttactccacggttgtgcaacgagctgtttcgccggattgaccaagaagacctcggcgagatcgtttatcctacgtttgctcaacgagtatttctaccagaaacatttttctctcccgatgagccaacacaagcttcaggccatggctcacccaccaagatctctatcaaactcgagcctgcagcccgacctgtgatcaggtcgccacgacaggttggtgggggtagcaatcacgcagcaaatgcggtacccagcccgaggaagtcgactccagtgtacgagtatatggctctggatgagcttgagaagtgcatcgttcggagactcgaagacaaaatgccgcgtggtgcaacggacgccgttggacaagcatttcgtttctttacaagtgcagacacgatcacatttgcggattttcatcgccacttgggcatgctccagatacagatatcgccacccaagtgcagggagcttttcgtccggttcgatcgagatagggacggagtcattgataccattgaatttgccacgactctctttaccaaggaaaaccgagcacctgaccgaccgaccagtccacgaagcgacccaagcgcagcagaccaggagccatctgtctcgaccaagcagcttgtgacgatgatacgtgaaagaatggaccaactttcggaggaaacggaccgtttccagcaagcatttatgctgttcgggaagcctaccgggatctcgtgcagtgatttaaactcggccctgaggaggcttgggctgagggtttcagagaagcagctccaggatctcttcgacacattcgactttgataaaaccggcgacctcgatgtgaacaagtttgtccaaggcgttatgctcgatgactactccacttcgttctggttgtctgttaaggacaggcaaaaggttgacgactcccggcggaagttgtactcgatggcagtgcaatcagtgcaagaatcgtggactattgctgacattgagcgtatgttgcgcgagaagatcgagcagcgcacgtctcgctcatcagactgcttcaggcaggcctttcgcattttcaagaaagtgaacggaatcaaaccacacgagttccacgcagcactggaagcaattggactagcgctaactcgcgtccagtctgacattctgttccgtcgatttgacaaggatggcagtggtgatatcgacttgaatgagttcattcacggtgtactgcctcctgattacattggaatatcctgggtagctgctgctgacgagttacaccggatcgaggcgaaaaagaagaaagagaaagctatggcaaaccctgagcaatacatgactgaaattgagatggaaagctggagtctggatgaaatcgaaatgcgcatacgggacaaaatccaacaggcgacatcaaggagctctgataccttccgccaggcatacaaaatcttcaagaaggccagtcatgtgacaatggaagagttccgggagcgacttcttgcccttggctttcgactgaccccagcacagtgtctaggactgttcaagagatatgacacggacaacagcaacgatctggacttgcaggagttttgcatgaagatcctgccaccagactacactcacgacggagatcactggtcgcattcggaaaagtataggaaggagcgccaacgacagaagctggaatacgtgaagagatcgaagaatggattgatcatgctgccgaaattcatcgagtcgcaccgctttactcgagggcactacgtttctcgcacatttgaaggaatgcaggaggagacaatgtcatcgttcagtagtcgcagtgatgccagtagcaaaaatggggcgactcgaccgtccacgagctctaccatcgacgaggtaactcgtactaccagccctcgacctccccgtacatctcgacctccatctaccagtaccaccgagaactccacttctcagtacctgccaagcccccgccaccgtccaacgcctgcttctcctacgagtccattggcatcttgtagcccacagaatatccgtaccgcggtgtctgccgtcagcagtcgaccaagtgatacccacgcatattcaatgcaagcggccccgccgacgtctccacggattgtgtcgcccactcgaccaatgtctcctcgagcaccttcgtcgactcctctctcaccccaccgccagggccgcccaatgacacccagaaagccctcaccacaagcggaggacgttgcgatcgagtacgaagacgaagagataattgaagacgatgatgtgatgtcgctagaattatcccgagtgaagaagctgtcgcgacaccggcgaaagcatggtaaatccagccgccgccaccaccacagcacccacgacagtgagcggagtagcagttcgtcgggtcaagtgtcagtgcgcgccgctgaaagtgttgcgggtagttccacgagtacagcaagtggagctgtgggaacagccaagcacatgccccagcggaaccacgtcctgcttatcaagcgcttcatgcaggcagctggcaaaggatcggagctgagctcgtcaaggagcgtgaagcggctcagtgttgcgcgccgataagctactgcacccgcctgaacccccaagataaaacgatcctgaaaaagcaagtcaaccaaccacgaacacgtaactcaagcaaatctagcgggccaaacgagatgaacgctgcgacgagccccaagcagaaagaataacttaaacattggtacacctgatgccaactacgaagacatctacacctgcacacacacacacaccagattgacagccacacaacgatggatgcatcggaatagaatggaggtggcaagaccgcaacgatatacccaccatgaagaaaccaacccaaaaagtaaagtagcatcataattgctaggcaaaccatgagcgatacaaaagcttcttgaagcaaaagcaatcctcctatactgttgtgtctacttcttttcgaaaatcgagtaatccagctggaagagcgcagcgagcagcagtgcacggtcttgtggggtcgagtcacgtggaaactggagcacgtagttcgtgaatcccccaccagcgcggcagatcgctttgaggcactccccactgccaaagctcacctgcaagttggctacaaccgctccttcggggtccaagatgtcgtacaccgcgtcattgcggcagcaggacggcgcgcagcagttgttgactcggccacagcacgccacgttgactcgcattgagtagcgcttctcgtaagacccgtcgggtagtgcgcgctcgatgtccgtgtaagccgtggcgagacaacacgccgagcagcaacgattcatgtacggcgagaagtcctctcgaatgcggccaatgcgtttaacttctccgttctcgccactcaagccgtccagccgcatttccagcgggcagcacattccgccgccgcatttgaacggacgctcaatcacgtacgcgtcgcctgtttctccttcgacagtgaagtgcatcttgagcgggcgcaggtaggcgcagccgaggtactgcagcacaatgcgcgtgcagaaccagctttcttcttgggcacgcatgaacggctcgagggccctcagctcggctccagtcggggaccacccagctgcatccttcgggtcgttcttgactttcttgtcagccggcaatcggtgaatggagtacttgtttttggcctcccaaggaagaccaactgcctgagcgaccatctcgccggcttgcgtggcttggcggaccaccacgccgtcgatttcaccgaattgcttctggatgagctcatagcctccagtactgcgcttcatattgtctggctaaccttggcggtgaatgcctgggatggacttgacgagcgatatgggggaacgaaagagtgaacaaaggtggctgcacatcagagccagaggattgccgaagtccgtgggacggagacttgagtcgtttcctttgcatgtagcaacggatgtcaacggaggtctattttcagagtgaagaagccttgggcaaatcttttgctaccgcacatgagctcatcaacgagctagcgcggatgcctgtcgatactcgccttccacttattgactgtcttcaagcgtttgtcgcggtgggctggctttttaatctgctggatacagcttttcagtttccaaacgcaggtgcgcaccgttgggtctgccagtggcttccagtccattgagttgtaggacaccacgttgtttagctccttaatcaacttgtcaagctggtccagagagaaaatgccgtcctgccactgctccacttgagcgagtagcgacttaagcaggtcctgcttcgccattgccgttttcgagatgcgaggcgattgagacgctttgctcggttttgcttttgcgtcaagcaggtccattatgcttatgacaagcctgaacgcatattgaggagtttgtgagcaaagccccttaaaatcatgcaagcttgcgaacgtacctttcccatccaacttggttgcccagcctcttgctgtaatcgcgcacgctatccgcaaagcgcagatattcctgggtcaattcattccgaagtgagacctcacgaatccagcggcccgcgctctcgactgagcttcgcaattcctctcgtcgtgcacaattcgtgtcatctgccatcacttgttgaatcgctccaagcgcctcgaaaattaacgatggcttttcatcggcggacactttctgaatcttagagctcagagtgcgataactgcgaagaccttcctccaatgaccgggatccacttttactggacggctcagcaagttctgctgctgcggaagggatgctcatttcaagactttccagctgtgctcgaaccctagcaaacattagcaaccgttaaaaacatttcgatgactagataaggcagcacggtcaacacctaggtcgtaccgatggaagtaaatcctcagctgctcgttcttggagcaagcgtctgtcagcgctgcgatcacagatcgcacttccttaatgcgctcatccatccactcaagcttttggaaaatcgtagctgcagcctccagcgcgcgggcagcaacctctgcggccggcttgtctgtcgtactagcgtcgcaactggcttggtgcttgagaatacgcttgaggtcgaacagtgcctccgcccactgattcaccatatcaaactggatcctcctgttgaccgtccgaaccgtcgaaatggtcttcaaagcatcgtgggccatggccagatctccactcatcttgccatcaccagacgcgccatccttcttgccttcgactttcgcccgctttggcgttttcttgtctttcggcttcacttcttcctcctcctcactgctgctcgaagaagatgacgacgaaggagaatcacccgcttccttctctggatcctttctctctttcactttttccttctttctctttctcttctcccgagttttctccttcttctcctctttatcaccagcagatgccacctcctgctgcaacatcaacacaaccaacaatactttagaaacccttccagcaacaactcctaccccaatcccaaacttgactcaccacttgcatgcccgcggccacctcctcgagcttttccttcaggtctttccgcagttgcatcgctgcatccatcgcctccatgaggctggcagtgcggccggtgggcggcttgccctgctccagttggttcacggcatcgcgcacctcctccaccttggcgaacgcagcaagaatttcacccaccgcgcattgcagcgcagagtactcgtccttcagcacgccattgcagctgcggtggagctccgcgggcttcacgagccccagaatccgctcatacagcgcgagcgtgtcggccatcaatacttgatcgatcgatgcctaaatttcacgaatcaacctaaatttcacgaatcaacctaaatttcacgaatcaacctaaatttcacgaatttgcacttgaagatggaggtgaacctggcacgcttcagcgccgccgagctgcgcgccaagagcacggaggcggtgcaggaagagctccagagcgccagaacgcacctctcacccgctgtcagcgccttgagacacgctttgaccgtcgtccaggcgtccaaagacctgtgcaagaccgcggtggtgttcgtggacgagtctccgcaggttgcgcaggctctggagcagctggtcgcggcgtgcaacgaggtcggcacgttagtgtgccaactgaaccgagcggtgagcagttcgggggcaagtgatgcgtcatccgacaccgaggaggaggagggagaaagagaagaagaaaaggagaacggttctcaacatctaagagcgggaccaaaggatctggaacacaggagaactacagaagagaagaaacgagctgcaaaggagatagacacggaggggaagggcgctgaagtagaagaagaagaacaacaacaagaaaatgtggagagcaaggagaacccgagggagctaaagcggcagagaatcgaagatacaagtcgtagcaggatccccgtgctgacgatccgctgcaagtaccaatagctacggatatcggcgcaacggatagtaactccgagaatgcggctccaaacgtgactgtggccccccctcactgacaaggcgagcttacgtaaaagaatggaagaagagcgcacgctatcccgattgagacaggaggcgctcactcgtttaggcagcatgaaccgccgttccagattggggaaattcgtggctctagtgctggttgcagctgtcgagctgatcgatgaggaaacagacccctcaccaatagaggcctttgcttctgcagcctgcacggctgaaagggtgctcgttgaagcggacaataaggtcgcgacggagcccttcatggacgatatgcgactagggatggtcattgctctaccgtaacttaaacgccagctcagccgcgtggacgtgctcgcaactgggaagatagtgaagctgctgaaacagctgcgtgacatttatccaagcacgaccagaggtacgtacatgtacgcttacctttactgcgtgatacttcgtatatgcttacagctattttgtaggaaccatttgcaacttcggcaacaccttaagacgtttgaggtgcctgttgaagtagtcggtgacttcaaggcaatattgcaggagatggtagccgacttggacgtgtggatgtcgaagcgatgcatcgggaagcccaagtttgaccagaaacttgcgctaattcacgagctgattggatatcgcttcgagatgtgggatcctcgtggagaaccaatgctgggggaagctatctcaaagctggaaagggttcgctccttgcaaagaggttccgaatgggatgaccttttctctttcaatttgcagggtgtgcagagaattcccacggacaacgtttgtttggacagccgatgtaacgtcgccgccttcgacgattgtgacgaaatcgggctctcaaaaacgctttgataacgctgcgagtgtggagaaggatttcggctacgtcacgacttatgaagaagaagtacgctgcatttctgcgtccagcgaaaagatgaaggcttttgacgaacttgtggacctcgtgcaatggcttttcaacacgatcagatggacagcggattcatcactgctgccaatcgatcgcctgtgccaattgaacggatgttttgaaacgctcacgaaactatgcgataacgggaagtcgctcaatatggaaggatgtattcacttggagaagttgctctgctcgattcgtcaagtgatgtacatgcggcgagactacgcagcatgctcaaagtggtacgtgtactactattgtaatgcgagtgcttctttattagacgataactagctctaactcgtttttgtgtgtgtacatgatcccaataacgctactgggtttgttcccacccgagatttgtcccgagtttacgtacccagaagtgagtctaaaccgaaaaagagtaaccaagctgcctgatgctcggcggtaagcatgctgaaactcccataaaagctgtcttcccggtgagtcaagcacctcgaccagcacacatttcccgggtagtccgcttctccaccaactgcacgaggagttggtcaccacaaaaaatctgctacagtcaccgggaataccgccgatggggtcttataaatgcgaccctcttatcacgtggtggttatttcccttttcaacacgattgatccagcatttttcgagatagttcactttgaaggtaaccttaactgatgggtgcaccaaagcgctaacatgctattcacatagcgaaaaacgaaaagagatggctacctgacctcgttcctgtgtctacgtttgtttccaggaatttattccgtactcgtgtatcctaagagcctgttcgcgttgtactacggtagagatggagatggtgcttgatctccacctacagctcgttcgctatgtatccatctccagacaaattttaagccaatcacaggacagatatgggatggctctcctccccacttgagaaaatgccgactcgcctcaccagtgcggccacgcatacaaagccacagcctgtgccacggcggagcacgcagcgaggacaattgcatcttcgtctcccatgttgtgcctggccctgtaaatctctaggtagatccgcccctccccacctcaaagagctggagacgaattcacagtgccatctctagtcgtcttgttgtgtgctacctacttttgaccaatccggtcacacttttggttttcgtctccatctccagcttgttcgctacaacagagcgcatctaggtaaaattagccgatcacagtgcgactcgctctccttctccttactttgctgttcttcgtcggccgggaacactgtgcccgacgcgtggcaagatggaccaagctgccgatgacgctccgagagctgcgcctccgttcccgtcagccagtggcgacctcgtgctggctgctgccagtttggacatacctgcctctgatgttgctcttgcccagactgttatgcgacaccggccactactcaaaccgagctggatgcccgcacttcctcgctggcgctgccgcattcagagacacccagccagctttttgcgctcggagttgtagctgcgtcagcccgcaaccaagactcacatcgtcgcgttgggaatcagaagaagaaggccaatactggtgaaacgtctatcgctacgaagcaaccctcctttacgtggacgactgcagcagctgatgccctgctgcgggctcgttttgacacggctgcaactttcttctcaaagctatgctgccgtactttggcagcagcaaacagaacaccttgatctcgtagtaaaccagcaatacgtaggaaagttggcttggtacagcgaagattgtcttcaaaccaacttgcatacgcggctgactggagcatgggctcaaagtgcagtgaggtcacggtacgaatctgttccttagggccttgcggcgcatcgtcggattctcctgataggaggactgcaacctgtgcgacagctgagcatgtagcaaccagtacagcttcctcttcgttcattgtgtgtgcggctgaactgcctcaatctccagctactttctccttctccagctctgggaactggagaaggagacggggtaattctccagttgtcacgttgtgaactaaactattttgaccaatcaaaagacaagaaatagagttgatgagaggtcctctccatctccagctacctagcgaacacgctctaatgggattgctatgtacccgttggaaggtctcaacagctccgcatcttagcccaaaatgattggagaaggtgatgatacaactttgtccgcaatcaccgagcttacatggcatatgcaaccttctagcgaatcgatgtgcttctggtcagcttcttttcgctcccaagtaatatgttgctgaaatggctcagaatctcatctttcgggccgcgctccgttaccatggtcggactgtgaggaataccaagcagcttggcgatactggtgcgagtttcttttcggtcgacccagagcttgagctgatagttctgcacggtctccgcgagattcttcacgtccggtatttgcttcagcgattccaaagctagcgccaacttttcctctgggactttgctgcgcagcaaatggtagatctcgtagtccgggaagctaccaacccccttcttggctctgtaggctttcgtgaacctgaaccactggatggtcctcttgctgttttcaatattcgcccaggcgttgaagcgattgaaatacttgaatatctccacggggtcccacccaatcgagatccaagtcttctcagccagcttcatgtcgagctttcgcatcttccacgtctttcggtctatatcggcgagtcttgatacccaccccgcattagcccctcgttcttcgtcgtctgcagggagaccggcatccttgccgttatctgccacctcgtgcgctctcaggagcctagtactttcgctgtcgggagtaggaatctttgagttgagaccttcttgggtatgcacggcggcttcggcagcgttgattaccgcgcagaaagtaatggcggctagcagggtaatgcgctgcatgcttcgctgggggaaatttacgctcttgggtgtcgagggtctattgcgaagtgagagattcggaagtcaccattcaagccagaccagattcatataagcttcctgtcagtgtagaagatagggactactgtacgtaactaaaaacacatcgtccacgggatccttgctcgcggctttggtacagatacggagtctcatcatcgtttacgaacccgctccttcgcagcacccataaattaattataaggtgctcgaccagtttaccgcaatgttttactttttccgcggaaaaatggtcataactttttttctagacatcctctcagaaatttaaaaatatgccgcaaatcaacagaaactcgcctacaacaaggtgatcttgtcgtggttctagtgttttgtaagcgagctacctgcatcaaggaaaaaccaggatgctttgacgagcgccggccagtttagcgcagcgaaacatattggggtgggaggtgatatcaacagcgcgccccccgctagctgcagcgcaggcgcacaggtgtattgccaaacgttggtacgctgcatggaatgcttcttggcatcgaaagctagctagcttattgttactggaatcctagaggcgctgctacatactgtcggctcagctccatccacgtgaacatggactgacagtcattatcgttaggtacacatacacacaggaaaatttgtgacggcaggtttggtaggtagtttgacattctcgtggcttagcaccatatatcatcttcgtaccatcgtggatcagcttgggggactaaggtcatggatcggcttgactacggtcatggatctggttgggtttgatcatagatctggttggctatagtcatggatctggttgggtttgatcatactcatggatccggttgggtttgatcatggatctcattggtagtgccatggatcgccgtggcggatcatggatctgaaccggaatgggttgggatgtcatggatccgcaatgcatttgccgctaagacttatcaacgtgttcttgcattttgcaaaccaattgtagccgatgaggctcacatggttggcgcaagcagaaccaatggcttcttgagctctaactactagtactacactcgtattgcaaatatgtttctcctcctgcaaaaggtcgactacgattcctacctgcgcttaattttttggtttcccttatggccatatcctttaagtaccaacacttgacaaaacatgcaaattgatcctcaaagcacatttttgtacgagcagcttgttttggggttttagtatctgtacgtcgatattggaatttgtatgtagccgcgctgcagctaacggggggcgcgctgttgaatcaacagtgttgatatcacctccccatattggggtttgtatgacgaagcatcccccattgcagaaaacgcgcaatgtgttacagaaagagccaaaatctgtacgctcttcaccaaagtgcgtacttttttcaccacaagggccaagggcttacagcagtcgttgagcacacggatgccgcctcgatacgaaatgaagcaactcaaaacgtattttcttgaacggatttggccattcctcgaacgagtaaagtcaattaagcaatagaaagtttttcatactacatgtgccgatggatgtcacgtgctttttacccttggtcactgaagttgaggctttcatgttgagcgacgatgcatccagcccattcagcacggatgcgccgtctcgactacaaagcacaagaaacgatttcttctgcgatcggctccccatcccaaattggggtcagaattaaaattttgactttcaggcaaaatagcttgttttggactggagatatcaaactgtgcgagttggacatatgttttagtaacttaccaccatgaggacgataaaagcatggtgctgctactaaaatactgctcaacaacgtaggcggcaccgtacccttctttagcagacctacttgatcgaagatacatgcaaagcgagagctttgagaagtatctcggcctggagactagtattctttaatattacgtatttaacaaaagagcgtctcgcatgagcacttggcgaacagctcaacaccaagctaattcttcgcctagcggtatgtaaatcgtgcctctaccatgtgctggtggtgacaacccacaaagatttgtagcaaatcagcagtggcgggcttgggtggggttgtgccttaaacccctattagtcaatattgaccaacgctacatgtagctcaaagaagtttacatgtcaagtgacactactaaattcgaaacgaaacgaaatattgaccgaagcagcggtaataaaaactgaaatctttaacgaagttgctttgctcatcggtttgtagattaggccctgtcagtctactaaaacaactgcaaataggcaaaacaagttgtacgtactcgttcgctgcatgcacaaaatcaagacccccctcctccaacttcagattcgtttccgattttccggtaggttgcgcgagcagtaactgcaaccgataaagcaactcaatgaaacaactgcgcccaaagtgtacacttcagtattccggtttcacgtaatatttctacacctaatagatgggaaacctgccagccagtccaacgtttaattttcgaatctttaattatgtcatgtgtcaaccctcctatctcctccaggcgctacagcaaccatcgacgacggtacgtagttcgagtcgcttatcagcgaagacgtggtggtcggtattgacactcttccaaaggcacaagcttcctcctccactccatcctttgaagcaagagatccatgcgtcatgcgtccgggctacgttctgctgcttgtggcagccgctctcgtcgggaccctggatgctgccgcgggtggtactgccgtcgcgccttccaagcccaaggtggtaaaccgtgtcgatctcgacaaaagcaccggaaacgaccaccgattcctgagatcgcacaaggttgattacgacaacagcgatggttacgacgccagcgacgatgcagaagaagcaggggaggaggaggaggaagaagagatgggctgggtggtcacgttgaaggcgaacgctgtgctgttgaggctgtcgatgacgaactcggctgataacatgggtccgattcttgccgagatcagagatgctggcgtcctggcagctttctttgaaaagctcgtgccgcacctgaaaaggatcctgccggcctatgaaaacggattggacgtcaacaagttcgacgggttgctacaagcatccaacctatcggacgacgtgcagaccgtgcagctcagtgcgtactcgaagtactggttcaccaaccattagccagacagaattcactcgaggtaacgtactcaaacgggatttcaatcggttttcggtactcctggaatctcggtgggttactgcctgaagttgacgtaacgtgatcttccagatttgtgtctttccttggtgcactgtaaccagttcctgccgatgaacgtttccgttgcgtgccatccagagtgatgttgttgcaatgctgcagaaggccgaccagataggcagcgcgccgcttgcgcatgctttggtgttagctctccgtatagggcgataagacgttgcttgaaccgagtggtggagatcgcgaagcaggtacttcgccagctccacttgtgttactgttgatcctgcccaatgctccacggaaatcatctatacagcctctgcatacggacaggtccataggaggcgctccaatgtctctttgtggccctcgcacctttgtgtcatccggcagtgtacactttgctcacgccctggaaaatacaaattaagttgactcacagcaatgtccagacttgaaattccgtcagaacattctgttgagcacgcagctctgttagtgtctggtcttgcgtcgccttcacccactcggactgacctcttcgactgtgtagtttgtccactaggcggcctagatgctttgcaagccccaatcagaactgcctgaatggttgtttcttgagcgcttgtagcactcttttgttctttaccttctctggaactaaccagggaaagtcatgcaaaagcggtgttgcctcaatcacgatgccatcatttgcagcatacttgactatatccaccccgcctcgctgtacttcacgatcgccatgcacgctagcaatcgaccagttaatcacgacgggttcctgtagcgacgtaattgctcactccgctgccgcttccatgcgcgggatgccctccgctgtttaacggtgcaatcctcctccactcaacattccagtgaaagtggcgggcaataggttagatgccttaaatcgcggtagcaactgtaaggtgctggcttgtacttgtggtattgcgggtaaaatggaaactgaattgttgttttatctgtttgttggtatccatctaccggagggcgccctcgtggcgcgcagtcctaaacatgcagtggttggccggaacaagcacttgcgcaaccggtaagtatgcggacggcaactcctgctctctgtgcgcggactcatcggatgttgtcgtattgctctgcgcttgcatgtgcagatcattacactcccccccccggcaccttgaacgttgaagttgccgaagttgaagttggtagtaccgtagaccctcggtgtaaggaacagtaccgtgaaacctctgttgaagagcattccactaggcccgtgctacttgattgcgttggcgaagatccttgagcagcgcttgccagtgactgacgtgtttgatgtcgcgctcgcgttcccacgtgttctcatggtgagggagcccgtgccacttgaccaaatactcaggttgacggttgaagatccgtttcttgatcagggcttcgacaacatgtagcagctcaccgtcgtcatcaaagatcacaggggtcgacttcgggatcacacgaccgacgaagcgatcagggttgctgttgtataccttgagcttgtcgatgttaaagcgtggactgatgtgcttcaagttggccggtagatccagcagtgcgacgttgccgtgtagttccaggatggggtacggaccgatgaatcgcggtatgagcttccgtgagagaagagtcgtttcgccagtggcgtgcgagatgttcaggtcttgcgtcgacagcaaggctagatcgccgaccttgaatggatttgctgcacgacgccggtcgtagaacttcttttgagcctcttgcgcatccaacagattcttccgagcacgttcgatcacctcttgacgatgctgaagaaatcgagacgcgtactctacgcgagacctcgccaccggctgatcgctctcagcactacccaatgggttcttagggtgacggccggtgtcgacgaagaagggcgacagctttgacgaggtggacaccagtgttgcgtgcgcatactcaatcatgggcaggtgctcattccattcgttgtcatggtacgagatagagcatcgcaacgagtcctcgagagtccgattctgacgctcagtttggccgtcggcctgcgctcggtgggcagtcgtcatcgctgtcttgatcttcatcagctgcacaagagctgtccagaacttcgacgtgaacttcgggtcgcggtcggagatgatagtcgatgggattccatagtaccggatgacattgttgaagaacagcttggcagtgtcttctgcggtcgctgcggtgtgcgtcgggatgtagactggacgctttgacaacttgtccaccacaaccatgatcgcatcaaagccgtcggacactggtaaatgcgtgatgaagtcagtcgagacaacatcccaacaagctgccggtaacggaattggttgaagcttgcctgacttccgccccgtgctcgatttgtacctcatgcaagacttgcaactctgcacgtaggctttgatatccaggtccatgctcggccagaagtaccactgagctgcagctagctgtgtgcggcggatcccagggtgcgccatgatggcagcatcgtgcgcgttgtggatgacatcgagccgaagtttccggttgtttggtacacaaaggcggcgtagattgtcatcattcttcaagtagatcagcccgcgaatgacttcgtactcttccgacgagcgtctggacttccacagtggcttgaagactggatctctgccgtatgccttctgaaacgcccgcttcgtttggttatccagctgaagtgagctgatcaccgtgctgtcctccattgacgctgcgttcaacctcatgcgccactgtgctgtgccaactccgagtgcctttgtggctggctgtttgacggccagcatcacagcttgatcccggggcggtatgctttggagcttcgtcgtagccatggtacgtcgtgagaccacgtctcgaatgttcgtgcatgtggtagacgtcaacgcgccgtacacactacaaccggctcgggcttggactcacaatcctcctgcccttcccccggactcgatgaagcatcaggggggcgcgacaacgcgtccgcaacgacattcaaagctcctggacgatgatgcagagtgaactggaaggacgcaaagaagtcgagccagcgggccaggcgacccgacaggcgtggatgctgcaaaaaccacttgcacgccgaattgtccgtgtacacttcaaacgagactccatggaggtaatgacgccaacgtgtaagcgcctgcttgatcgcaactagctccttctcgcaaacaggccagttcagctcgtgaggtcccagcttcttgctgaagaaagccacggggagatcgttgccatcatgcatctgagagagcactccaccaatgcacgcatggctggcatccgttggcacgatgaatgttttttcaaagtccggcagacgaagcaccggagcatgctggagcgcgagcttaatggcattgaaagcttggcgctggtgttcgttccatacccaagcgacatccttcttgaccagagagctcaggggcagtaccaacgtcgcaaactggtggatgaagcgacgatagtacccggcgaggcccaagaagcgttggaggtccttgatgttgcatggctcggtccactctgcgatggctcgagtcttgcgagcgtccacgtgcaacccattatcagagatggtgtggccaaggaagtccacagaggcttgtccgaagtcgcacttgtcaggacgggcgtaaagcttgttagcgcgcaggacttcgcagacctgtcgtaagtgctcaacgtggccagccatcgatcgcgagaagatgcagatgtcgtcaagataaacgaccacgaacagtagataactcagcagcttgcacatcaggcgtgtccacgtgcctggcatgccggccagacccatgggcgccacgttccaatgatagatctcatggttcctcctgaatgccgtgtactgttttgacgtcggagacatgggcatttggtggtatccactcgcgaggtcgagaatagagaagaccactgcgcccaccatgcgatcgaagagttgttcgatgtgcggtagcgggatcttagctacatccgaggcggcattcaccaagcgatagtcgatgacccatcgaatcggcatgtgcgggttgttcgagtgcaaccactccaagcgggatgggaacttgcccgtcgagggatcctttttcggcacgccgaagatgttcgatacccagggagagttcgacacttcgacccagttcttcttcagcagctctgccacaaagatgtccaatgcttcctgctcaaccttcgagaggcggaagggagctcggttgcttggcgtcgcccctggtttcaagaccacttcgtgctcgatggagcggcttggtggtaatccaggtgccagctctgctggaaagacatctgcgaactcttcaagaaccgcttgaagctgcaatggcacggacttcaccttgggcgacgtcttcaccgtgacatgatacagttcgacgtactcgtcagccttcaccttcttctcgaactccgcagccgcaagaacacacagcggcgacgcgtctgtaccatcgtcaccgtcgtcaaagatgcgtggtaaggtctggtgtcccagcgctgctagtgagctcggtcccaacggcatactgaagtagcctgcctgcacatggtcatcgagctgctgccgcaggttcgggggaagcgggtgctgaagaaattccggtttcacttccactgaagccaccgtcggtcccgccacctcatgactgctgttcacggaaccgaagtcatgtactacacgctgattggggaagcgcatcactccggtttgccaattgatgatcgggttgaactgcactaaccacgggtgaccgagcatcatgtcttggtttaaagatacctcccattcaatgagagaaacatcgttgaagactctgccatcaaagcagacagtctccaaacattgctgtgcggtacgcgccggggttgtcgtgccatcaaagcgctcggccgcgaccttggtggcctcaacgtagtgctgcgcgaggcccggacgcacaatgttgcgctctgcaccactgtcgatcaagactcgcactgcctggccgctcatcgctccctcgaacctcaacagttcacgattgggcgacaacttcgcgtcgagagacaccatgttcagctgcaaactgtcgatgacctcgacgtggtcgtcgcggttgtctgcgtaggcgtcgtcatcgtcgtcgggtgcgtcgtcgtcttcaacaatgcggcgaaacaagccctggtttgcgcggaaagaaccgcgcccttgtggaggacgagatgagcctcgggggttgttacgcgctggccgcttaggacacgtagccaggcggtgtccgggctccttgcagtaaaagcaaagattacttcgcagacactcttcgcgagagaagaagcgcgaactcccgatctccattggggtcggctcctcgacgtgatgtgacgactgctgaaggcgttgtggaccttggcctccgcggttcacgttggttcgacgcgatcctacagcgtgcgtgcggtcgtacatgagtgcaaacgaaattgcgtctgtcgtgttcctgaactggcgcagcttcacctcttgtttgatctctacgaccaaccccttctggaaatgcatgaccttgtcgatgtcgctcatctcctctaccttgtagatgatgtgccggaaggccggcacgtaatcttcaagacaggtgaagttgttctggcgcaggcgtaggagctggtcacgcaggtgctcttgccgatcgggtgtcgtgaactcgctggtcagcagctcctcgaactgcgtgaccgagtgcaggaagttcccgtcgtgggagacgtactcgcggtaccaagccgctgctggtcccttcaagtttgtcaccaagagcgacaaggggcgctgctgcggcgagtcggcgccgtacttgatgttcttcgactcaaagtagagcttggcgctgaagaggtagtccgcgacgtcgtcgtccttggtgccggagaacttcggcatggtgatgccctcggcccggtactcgcacgtgtctggcgacgaagagtcggccaccgacggttgctgctgctgcgaggtggattgctgctgctgttgctgttgcagtgtcgccgccatctggcgctgcagctcggctgtctgtgccatgaactcctgctgctcgcgcatcatcgccgcgagcgagacgaacatctgctgcacactgtccgcgtgctgcatcgctgcttcatccatgtttgcgcctacgctagacacgtcgtcaatggatggcttgggcgcgcaagctcctcagccaaatcaatcaaagtttgaagtcgcaggcactcccaggagcgctgcttccgacaatgtctgtaagccccaacgaagtcacagaagctcgtcctggagctctgtttccgacaagtaccaaccacttgctccagcgtcccgaaggaagcaactggtgcaattccgtccggcgctagctcgagcccgcctcggagcacaaagactcctactactagactcgtaacggccaccgacgcgggtgttacactcggctgcgcactgtttgcaagtgacagccgaggcgacaagcggaaggtcgaggtgggtgccgcgtatggacacgcgggagtgattgggctaaatgcaccaatgagatgtcgacacgaagtgacgtgtgacaatgcgcgtcgccactcctcccccagaaagaaaaggagcgagcccggcaaaaatggaggtcgcgtcggcgacgagcggaacgaagctgcggacgaggcaacgcacgcggcgcacccggagaagctgaacggcgagaggtacaggcgcggcgcaccgaagaacgtaggcgaggaagacggcgtgcgcaacggcaacgcgggatggactaggctggacggcgtgcacactagcgacgcgtggcaggactggactggatctggaactggaactcgaacggagactggaactggaactggaaggaagcgctcgctggaggcgccagtgctaccaagtgtaaggtgctggcttgtacttgtgggattgcgggtaaaatggaaactgaattgttgttttatctgtttgttggtatccatctatcggagggcgccctcgtggcgcgcagtcctaaacatgcagtggttggccggagcaagcgcttgcgcaaccggtaagtatgcggacggcaactcctgctctctgtgcgcggacacatcggatgttgtcgtattgctctgcgcttgcatgtgcagatcattacagcaacttttaacaaagttataacagtgttaagaagattgctacacttataatatttctaaattcggaagccgcacatcccctactatctcagagcttcttcgggctttgttcgtgtagatcagcactgtatcacttgatactccgcttttagcgttttggaaagtagatcacggacagggcaaaaagataccactaaaaagacacatgctggggaccccagataatctgtacttatgaattgacacctttagtgcacctacccagggtggcaacgttgctcgttacccgtctaaaaggcaacaaaactctcgaagtgcgtgtagctgtcgctgctaacactccggtacttcgaatgtataacgccgttctcaccagtcacgcgcccgtacacagcgacttagatccactgtcgctcttgccgacggggatcttggacgaaggcgcagcacactctcctccggacaccatcgtgatattcttgttggggttgttgcaggccgcaagtccgaggttgcactcgttggtgtacgtcacaccgtcccgcacactgggtcgcagtctttgttcggcgattcaagctagactccctcttgaattggaccattctccactgctgtcgccaccgccgactaccaatgattgccacacccaagcagggtttcaaaggccgtaggacaaaaaagtattaaaaaagaacgaataataaaagcaaacaagttggcgatttaaaaaaactgcaccagctaatatatatttaggcagactcgatcctagcccccatgtcttctttcgtctgcttgggcacctccttctccttcgactttagcgcgatcaccagtttcagcccgcaaaaaaatgttgagctgtgcaatggttactctatctgatcaatcgcttgtcatttgacaaatgtccgtaagggcgctttaaagctgatctctgcatctttgtcggtcgtttcttgagcttctacagtatttccaggacattcagatcggagctgccaacatcccagactatgtgatcggtcacttgctctgcggcgaagtaccagagaacaagttgacgctagccttggacgcgttgaaatatattctggactcgaaaaatcttctcgctgttgcggtttgcacagacatgtacttcagatccaaacctatctctggcggcaccttgccttcttattctaccgataattggtctgccatttcgcaattgtctctaaacgcgccttaaaggtcatcgatgtcttgatgtcggtcgtgttttgagcttgtagggtatctttgaatatcttgacacagctgcgcattgttgcatcccgatatgggtagtaacatcgttcctcaagataccaatagcgtccatcagtttcttactctccaggcccaatatgggcttcccctggtattgcttcacttcctcaaaaagttgtgtgacacggttatgaatcttagccaggcgttccttggagttgggtgagcctgaaatcgcatcaaacatgttctccaatagtctacaggtgggagtaaatgggcctagttaatcgacttctacgtagtagagcaagcattgcgtagagatagtgtacgtaccctacaacgcgatctctctttgatactttaggtatgcgaattgaaaatttcagcaatgtgttcacgaccacgcgatataaagctagaaagaggggcttgtgtaggtcctcacttagccatcgagacattgtgccgaccaccttgatcattcgatttccgaacgtatcatttggatcagcagattcccttttgaatgcaacaagcaaacgtagcagccgcccgattcgcgtttcaccattaattgggcgtccaatcacattcgatactgcatctgtccgtttggcctctcgtatggagccctcacgggtcgccttggcagtgttgctcattacgactccatcaagacgcttgatcgtagtagatagcgccccattaagcctagaccggtgaaatgcagcctcaagttaatgcatagcgtcggggatactacaacaaaggtcacagtgtaactcacctcttgagctcgtccttttgtgcagaactaggaagccgatccgcgtacgcctccaccgcatcagcgtactcacgatacatcccagcacactctgcgtcgtattctcttttgtgagtcccccaacccagcaaaatcttcaaagtacaagccacttccgactgctgcgaaccatccacatccgcttccaccgactccttcaacgcagccagcacctctggaataatgaacgaccgagacatcggagataatttgcccacctcttccacaattgttttccagtaggtggccgatttcttcaacagttgcgtaatggcgctattgcccgtttcagatttcttgacgccgtccggaccccccttcacttcggtcgatggcgcacaaagcgcccccttgctcatcagagccttccaagcggcttcactgccttccacctcgtcagaatcctcaccactctctggctcggacgatgaactcgacgcggagtcaaacgctgctgccacttttcgttccaccacgacactcttcctcctcttggacttctgcgccctacgtgtattacccattgcttcctccgagttctccgagtctgaatcaacagcagtttccatcctctccaccttgttgatagtaccattgctaggcgccttctcgccaccactaaaacccactggatggacacctcccggtgctgttggtgcctcttcatgcacccgcttccgcttcagctttgccaccttcatcccagctgcggggttctccacttgacgctgcaattgttgctgcagctccatcgcattgtctgctgatgtccgcgagctgtccctgcgaccgccagttggcgggtcgtggctctgcttctgcagctttgagacggcatcgcgcacctcctccagcttcgcgaaggctgccaagacgtcgtccaacgcctgggagacagacgataattcatcgcgtaatacgtcattgtagctcttgtgcagctgcggcgtcggcaggtgagccaggacgcgttcgtacaactcctccatcgtgaagaaggacgatttcgtggctaggatttgggtgctgtatccaccaaaaactagtgagaattggacctgggttaacctttttcttcgcacatttgagaccaaatgtattgtgctttgcagataaaatgtcgccccgttttatggcctagatcgaggaaggccggtccacaaatcagggtacaaaacagaggcggtagctcgatttacttagatcgacctcgaattgcgcttttgaaaacgcaaaagggatcgatttaccgtagatcgacctcgaattgcgcttttgaaaacgcaaaagggatcgtagatcgacctcgttctgcccagatccaccaggagatcgacctcgagccctgatttggattgtcgtagctcgagttattagccgggctaaatagatcgatctgtccctttctttgacctcgttttattaaatcgatcatgatttattattactcgagtcaaaacgacaaaacatttgcaaagcacaataacagtacctctaaaacccatacttaaagtaacatactaaaaccaaatgtaacgagttccggttgccgtacctcacagaaagaatggttaacagatacaatgccaaaacaagattttcgagcatttggtttcgtttcattgctttttcttaacataaagaaagcatttccaaatcggtggttaaatttaaagcgtttgagcttcgcctaccgaatattagagcaacaggcctgggtgtggaatataacgtaatgcctcggacaggctcacagccttaataacgagcttttccaagagcacatgggtcaaccgcaagccaacgagggtcctattgaatcagactgctgagccttgagtagatcattttccagcttttgaaattaccgagctactacgtagtattaatacatcttaacatacagaatgcatatttgcctttttactgcagtaaatggtaacgagagtaccaaacgcgctacacccacagtaacctttctgtgaggtacggtactatactctccaaaaaatacattctaagataaaaaaactccttatccctagtatttttattagtttagctagctaagctagggtggtgacgtcaagatgccgcaagtcaccccacgagatggtcgactctcgcagaaagctttgagttcggtgggcagaactctccgtccacctgagggctcaccgttttcgcgcttcagtcgactcgcgcaccaactggcagtagtcgctgtttcgatcctgtacgtcgagatctcgctcaattccttttcgactgcgatgatcatactccacggctccgtgtcgcacaacttgcccgtcgacacccacacgtcaagtctgatcaatggctacgccggcaccacgacaatccagcagagtcctctcgtccagcaagtgcttcaagggtcgacttcgccccgcaacgactcctattcttgctgacagaggcaacccactccttcactgagtgcctgaatgttccgaggttcaacgtggaaatctacagtaacgagttcctgcgcttcatcttttcgaggcttcagatgcacgcgacatacaacctctcgtacatggcagagctcgggctcgtagctcctgtggtcgactgcacgtttacgttgctcactgcaggtgatcggactgtactacctcacgcgtcgaaagagcaatcactcggacgtgcttctgctgtccacttcgctctcagttcaagactatgaagtggagaagcagtttcaaaagggacctggcatggtagtgtcggtcgcggccatcaatgacatgcaagccactacagtgagccacgacatcgcggtcgcgtataactacccgtacgtggctgagccagtgttcgcgtattcagagctgatcaacgtcgacggcgacaactactggcaactacgaacactgccgaatccaattaaccaggacgcatgacacggagatttggccgctatattagtgaccccactgcgcggtcgaacatcgagatcgcgcatttggagttgccgagcagcccagcggcggaattgggcacttggatatggcacagtcgagctgtactacacgactcgtgggcctggacgcacgctatccacggcatttttgcgctcagcgtcatcttcaacctaagcgtgctggccttcgtgatgtatcggcgcatgcgcatgggccacttctgggttggagacgcattctccacgatctccaacatgctcttgtaccgcggcttgctggttatggtctgcaaccacatgaacggctactggacgatcaccaagatgtgtatctccgttggagactcggtcacaggactgcacgccatctattaccgaccggagctcgtccacgcagacttgttagcaatattcctgaacgtagcgagtgttctcagctatctcgcgcgcgaacgtgtggacccgttgctcgtgttcgcaaccttcgagctcggttgtggtatagcgttgagctggccaagctgttccctggcctgacaaagaatattgtggactttgcagtggcggacgcgacgaatggactgctgagtgtgagccctggtttggcggggctcttgccgctcatcgtgatgaagctgactcgcgtccgattcacgaacattttcgtctacgagatcgtggagaaaaactcggtgaaggaaactgcaagctcagccgcagcttcggcgagaagtcgatgaagccttcgccggccatttgtctcggacgtgcgagcctcgaaccggcagattgaagagtaagtcaccaatcagacatgcaagacgttccaaaacaggagaccagaaccacaaatgacaagacttatataaaggttggggcccagaaagcttttcactgcatttagcctcagcggtaaataggtttcatagagcgcaacgctctacagcgattattttagcccagcttgtcgtgtaagtacagttttgttccttgcgcaactcatcctcaaactattagcagagcaatgtatacctacttatcgtgtccttgcaccagtcctctgatgctttgcgaaagagttgtgctgctttagcaaccattgagtcttgccgattaactgtgagaatgcacttcgttgcaaaccccgccggcaatgggaactcgttactagtgtctaaaataatactactatagtatgtctgcatgctgcgaggcttctttctttccgggaataaagattgaaactcaagggaaaaattaaaaaacaagaaagctgtaccattctccagtacaaacaatgataaaaccatctttgaactatcgtgtctgcttcaggcgcgaagaaacctgaagagaataccagtgatgtcctcttagcggctgcttcggaatagtccgtatgggtaaacaaattcggggcggatagcttcgggaaacaggcttatcagcatagttggtgcactacgtcgaaaacaacgtcaattagtactgatctggaatgaataatgctgcgacaccatttaccttttcgacacttctgcatagtctcttcgaaagtacatcatacgacgaatgctgaagaatagcttttccaggtagatgcatccttctaagttcagcgcagcgccgtggtcacaaagctcaacgagtgtaccgatacattgatttagtcgtaccagtcgattcactgggacgagcgactgtttttttgtcagaccgcagtgaaaaaccattccattcggtccacaagttcttcgaaagcgccgagcttttccgcagtgtcagtcaaaccacgactttcctcttcataactggtaacgtactcgaaatcctgctgtacacgttgctgatctttgaaaccttcttcgccgacagcagatattgcggccgtactgggtagtgttgacatcagatcaactgtccactcgaaagtggaggcagacatcttactgcaggccttgcaaacagcttcgtagcgaccattccacgcatctcctttttgaaatgaagcgaggcatcgaatcctcgtcaatactctgccaattattgcgtcgttgtacggattccagttttcatatcgcccatcgagaagctcgtttacgagaatcatcaacgaatcaaagtgtttaacagaaatcccagtgaagaaattccccccacggtcactgtctagtgtccgaagcggttggactttcaagtcggccaccactgcatcaggcaccatgcacttcttcacaataaactgacggacttggtggcagatcctgtcgtaacacacttactttggttggaatgttttactataatagcaataaaccgcagcacgtaccgaagcaggttcttcgttttcttcgggtagagttcgtgaacctgcttgactactttaagcgctgtccatgccgaattcacttcaccaacaccccagcgcccatccagattccccgccacaacactcatcatcaattccatgtcctccaaatggcgctctgctcgagcaggttcccgtgttttgatgtcaatgagggcccttcccgcctcagcaacggcagtcagaaatgaccgcaagtcaccatctccagcgttttcgttctcctccagcttgatggctgcactcagtgccaaccgcacagactcccaagagcgtcgctcgtcgtcgcttctgctcgctttctcaagcggataacgacatcctttactcgccgtttggtccctctcgtttccgatgtcaccgcctttcgcttcctcacttcgtggaggcaggcagttttccgcttccagtgtgctcacgtcttcatccgtcaaggtcgacggtcccgtttgctctgtagagggcgtgtggccaacaccactgcgctcttcatttgcattctcagttttaactctggtcggctgggtccgttcctgtttcacttgacgggtcgcggcctctcctccatcttgcgctgagctacccccctcttggttgatctctcgtttgagttcctcaagcacccgtcctagttgctgataggttgcttccagttgatgcattgaatcggccacaggggcagacgcatccgcgaagctcaacggagctctgtacgtctttttggaggctcgcgccacgctcagcgccacgtggaaggctttcagagcaggttggagctgcgtctgcgcatgctggagcttgtactgcacagcggacagacagctcgtcggcgctaaactgtgagaggatagcgtccattatcttgaggcgaatggaagaatagtgctcttaattattaacacagattatttactggaaggtcacgaaaagccgccttttgctatgctaggtcaaaagtctttaaatccgttaggtccttccagatggggataaaacatcgttggaaagcgctgcgtgtgctctaaatgatacgcaattgcacttagcaggaagagcattattaaaagcagagcatgctatgatgtgcaaccacttcactgataatgctgctatcgagtcgattctaaaaatagcgcatgctcgacccttcaaacaactgagcttgagtatcgaaaacgaacagctaaggggtggtctcatgggtaggaagataggagtgctaatgacgcctgacctagcagcaaccacagcgtgaaaacgtaccagtgcatgttttagatgcttccgagggcaccatcaaagtatggggtggcttgggccacttgcggatttaattttgatgaaaccagcataatttgaagtgaccttccagtaactaatctgtgttaataacaagtcgaagcagcgaagcggttttatatctgtgatgtgcaccaccctaatatatcttttatgcaccttttgggaatgcacccaaattactatcccataaatgggtcactttcccatttgctattggtcatcacatcggatggagcttgacgggcagtacgagcgcatcgtgcgtctgatccctgtggacgcgctccagtcgagctgcaatagcgtgatacaggaaggattctcctctatagacgccgcagttaacgacgtggcttcatccttcgccaagctgagggaggtgcgcgatgccgccaacagactgcagaatgacgcacacgatcacagctccagtcttttggcagctctgagcggcacgttgaagctgcaactggagctggaagataagttggatcaagtgctgcgagtgtcggtgagtcagaattcgtacagtaaaaaaaatagaaggtgggccgattggagaataatgctcgtcttggaactgtagatggaacagaagactcgaagggagagaagacggccacgtgaggacagacaagtgattgcacagataaatagtggctcgaattcagactccagcgatgactcggagtcggaagccgagtcgaggtctgcgtcggaagacgaagacaatggtttggaaactgggaaaactgctgacaagttggacaaagcgagtggcctgcgacggaaggaactgtcggaggatgagtgcactgggagctcttcaggcggcctgttcacgaatcgcaggactttgacagcgcaactggatcagtctggtgcaacacgtgtattaaatctgtcggcaccacctcaatctgcaaggccgtcgccagtcgcaggtgaagtgaccactaatgaggggaaaacgagcgaacagtacttgaaaatggccattgaagcggacgaaatgccagttgtgggaaggcttactcgtatacgaggagtccttctcgagctgagtgagatgttggaaactcgtgggacggacggattacgagaggaacatgccgtgaatatcttgaaattggttgttaaatggcctagggatcccactgatcagcggggtctcctcgacgcgcacaagaggtttcttaaaggaatgggtgtctatgaacgcggagcccagaatacaaagtcgaaggccagactgaaggggtatgtgctgcagaatcagcccaatgttggatctatgcgcgcttttggcacactttactcacctttgtctcgttgttggttgtcatgtactgaataggttgactgacaagctttctcgtgtaatacaaggcttggacaaatcatcttctgatgaagaagacgtcagcgattctgatggcacttctgagccaatcccgcggagactcgatggccgtgaagaagaccctgcagatcaaagtccttcggtatcccaggctggtgccgatcgtgaatctgttccacgcccctgtaatatgctattgccaacatctcaacgccaaagaggcaaacctccaagctactacagacgtcttgttgatatggtgaagcgagagcctttggcgcacaggccttcatccatgccatcccttctagttgcgctgatcagagcaatggaggatgacgactattctggtcagcagaagtggcaaattgtcgaatcaattggtcaagtcgtggagtggatcacagagggattatccttcaaaatccatttgagtacttaccgtcggtgtgccgatgcactgatatcctacgcgaggcagcatcaacaaactaagccactccagaggtaagtagatgaacaaatgtgcctgggggagaagtccatgcgaaaaaactctaagagtttggtgtatggttatgattttgcagggttgccgacaatttttccagtgctatttgtcattctagctcgcgttatttatcttccatcgaccagcgtcctccccgcttggccggcacatcggagcttccaagtgtaattaagtctccctctggttctgtaccatctagaggaccagatgccgaccaagtaactcacagccatcagccacatttttctaggcttgtggctgagttggccacctcgccgaatgtcgccggatcccagcgtatcgtggacgtggtggccgccttcaaaacgtcgatatcaggcgacagcgagggccgatacttgctagcggtaacggaggcagtggaaaaggtgctaggatggattcaccgagatcctcgtgggctggagctcttccggctgtatggatcattattcaagaccttaagtgcgtattcgacgcgtctgcagagcgaaacaaagaccgcccaactggacaggtaggcgcccaccttgtcaacgagctaaaagattttgtgcctctctaactcctggaatgtgatgcctttggttgacgctaggttactgattggaatgtcagaggcattgctgaagccgccaagtccaagctctatcctcgtcgaggattccaagacgtcaggtccgactgaagaaagggagcagtcaactgatttgatgacaaagactgctgatgtgccacacctcgtgacatccgactcagacaccagctccacgtctggctcagagtctgagtccgattttgaagatgaaaaagaggcgatgggtgggagccaagctgcttggaacgcgataatggcagcagccaataatgcttgagttcatgtgaaagacatcataaagctgatgaggtgcagaaatgcttaaaggtggatgagactttatggaactggcgggttcagttcaacgaggaagccctatgtctacttcggcgaaattagagaggtgtagtttactgaacaatagagatatatcagtaaaagcggagtcaacccagcaactacatgtaaacatatagacgtatcgtatggtaaagcaatgtttggcgaccttcataataacttgagtatgtatgttggacacgctcttagaaatgttgcttttgagtattatctgtactccttcgaagtacacgaggtacttagcatcccttagagtcgacttgttgcctttgcttctttgcaatacatcatcacgacttttgaattctccatttcttcatcacggtgttgcccggattacgaggtaccgttttcaagcctttgacgctttgctcgagtagttggtagcactgtaggacaatgcgattcgttcaaggattccaccccttttcctggtggcggatcacagcatccagtgccagaatgcagtcgtcaacttcagcagctgatcctggtttcagttgctgcaccatccgaagtactttttcgagttttacttgaacgtcttcacggggcgatttgtttgtaaaagcctccagttttcttgcttcactgtacatacaccaggaatatgtcagttaaactcacctagcagacgagcaagttcgcagaagaacgtaccggtacagctcgactttcccaatgaaactcgaaatgttgtccgcgtagccccttacacgttcagccaactcgccatataacttgtgcagcgacggatcacgaggatcgcctcgagcccattgccccactgtcctcacagctttcgctagctcacgaaactgcacggtcttctcgttctgagccatctcgtcgctcaaaactctcacgacctcatggatatgcttgcgtctttcttggggtgccatcgagtccactctccacaccaacaggtcatagctcagttgtacgtccttgtgggatggggttgctttgttccggtctctcagcaatgcggacaatgagttgttgagcctgacatggcaaaatagaaagtaatgtaagttgtgatactagaatccccctcaattttggaggcacttacctaatcatgccgatcaacccgtcagacgggggaaggcgctccatcattccaccatcgcgtcgttgaagtgcctaaacgccgccaggttaccgccctggccagcactgaagtttgcccacagaatcacgtatttcaatatggagacacgacccatttcgttctgactagaaatcattgtctccaacttggccaacactccagggacatgtttgcttctctccaccactgacaactgcgtcatcatccgcaacacttccaagcagttcgtcggggtcatctcggacacccaagaagagccggcatccttctgcaactcgtcggccttgatcttctccgctttcacgccagctatcttcacagcttcctcctcagacgctgcagtcggttctccagcagtattatgtgctgctttatgaccagtcatcttccgcttgacgacagctttgtctcctcctcggttcctcttcttagtcgcctggttacatcatcgacatcgacaaccacgttagtgttaacacttgaccacttcacaccgctgtacggtaccaacctttgacatctcagatacaactctttccagttttttcttcagttcttgctgtaacttcattgcgctgtccatcgcttctagcagactctcactgcggctaacccgtgctccgttgctcaactccaacttgttcacagcatcgcgcacctccgtaagcttcgcaaaagccagtgtgacgtcgtttactgagctgctgagtgccgagacttcatcgtgcagcacgcctgcctcgagcttctccacgggtatcagcgccaagatgcgctcatacagcgcggccagctcggcagtggacgtcgccatgatgattggcacggaaaccgtaccctggtacataatgtagccatggttacagggaaccattttgtaccccgaattatttacgcggctggcgtaaaagtctgcgaagattgcatttatagccccgctgcgacccggaattaacatgcgaaattagcgaacataagaaaataagatatattatgcctttctggcaaaacgccctccgatttgaggtcctacgtaggatttttgctcctacgtaagacctcataaaagttagtactagggccagtaaaaccatgcataagccaaaacggaatgtaagctgagcgaatggcttgcaaaggtaggccgacaagtgagtgcgttcagtaccgctatacctgtagcgcacgtacgtagctccacgctgagcacggtgacctggttgcggtgctgcctgagtctccgcctgtacgaatgcggccaaactatgcatttgtcacagatgctttcaggcacactggcctgatctggtcctacgaaggactcgttagtcctacgaaggctcaaatggccagcttaacatggccattcggtccttatttccaaaaaggtacctttagatgaagacagagctcctacgtaggacttccgtaatccgatgccaggccaacagcaaatcctaggtctagccctaccctctccctcttaagactacctttttgaggtcagattggccaaagtttcggaaaggcacaataattatgatcgatcggggttgtacagtaataggactggggactccgttgtgaccaggggtcggctagtggggcattttgagtgaggcagctttttttccacaacttgtgtgtgttccccggtggtggacccgtagatgcaagttgcaactaccagcggaggttaggttgccgattccaacagatattaataatactgtgtgtcctggctcgatatctgttccatagttaagcgcatcaggacattcatatatatataatgtatggtattttaaagtgattctgcatccgccattactattgagggggtaaggaagaataataacttggcttcgtaagataaacgaagtcgtaggggactcctagtgtccctgtgggtaaggcccacgaagatcaagcgttccactgagggttcgagtctcgattccgatacaaaagccacataagtctatttccgacacccgactacctccatcactacatcccctggaaccccctaagtcacccctaatggagctcccgattaacctctgcagccgcatcccctcaaaccgccgcctcaccacgacctcaggaagggaaaccgattaactaggaatagttacctggggccttctctctctctcagataaacgaagtcgccgactagcaaaacgatacgtccattcagcaaagttaattactgtaattataatgtataattaccagagatttataaatggcaatatcagacccgttagctctgaaatcaatttcagagaatgtgaaatattgccagacgtcgacggcgaccagcgatggcgccgactgcggcagcctacttctctaccggcaccagctttcatcccgcggaccgcatcatcatgcatttacacaatcatcaacaccgtcaacaacggtactgtacactaatactctatagtcgtggaccaagggttggtgcagcaaaaagtcatacacactgtaccgtaaatactacttttgctcgtgagcaatcgacgcattatgctatgctggtttcacctgaagttccacgcgtttggtgcgagtcgtcggtgattattcataccagtagcagttagtcaagtcaaagtacagtactcccttttagtcctagtggtgatgctaaaacacgatacactacagtgtacatgtacatactattcatactacaggtattaatatataacagtgtacgtatgtcacaccatagggtgttggagaagatttgatctgtaaggactcatgacacgggcttccctctcgataggaatccaacgatacccactgcaccaagcaaacgtaatatactagcatctccattaggaagccaaacagctatttgatagcgcttattgtgctttgcagataaaatgtcgccccgttttatggcctagatcgaggtaggccggtccacaaatcagggcacaaatcagagggggtagcatggacgatctcgatatacttagatcgacctcgaattacgcttttgaaaacgcaaaaacgatcgatttaccgacctcgttctactcaaatccaccagcagatcgacctcgagccctgatttggattgtcgtaggtcgagttattagccggcctaaatagatcgatctgtccctttctttgaccttgttttatttaatcgatcatgatttattattactcgaggagagctccaagtcaaaacgacaaaacgtttgcaaagcacaataccagtactttgattaatcgatgtttactgtggatttgtgacacctgacggtatttgaatttgaatttgttgctgtttagtcggctatctacacccaatgttgacacctgacagtagcaaggactgcccttcagtatacctacaagctgcgattgaaatcccctaagaagaaattttagatgacatcaagagggcacctaacgagaactggttgccgtccttgcatagacggtctgtatgttatccttgaacgctgggtctatgatagacccagcgttcaaggataacatctcggatcggagtgtaccgtaccgtacggcaaattaccgtcggcaatccaaccgtcaacaagtacgtacagggcgtggtcgaaattactcgattggcctctatgaccagttggcaatttgcaattcgaaggctcaagcattcatcccagtcatccgacctcgattcaggatcatgcgcttgagttgtgttgtgctcgtggccgtagccgctctcgtcgggacgctgcgcggcacctcggctgctactgacggacagcttttcaagccagtgacgatgaatgccgtagagagcagaagaaacgaccggcgagccctaatgacgcaccagggcagcacgtacgaggatgaagaagagagaggctggaaggagactctcacggctaatctgattttcgcgaagctttcgctgtcatcgttcgacacataggcccgatcattgcgaaaatccgagatgctggtgttctagccgctcttttcgaaaaagttgtgcctcacatgaaatagattctgcccaagtttgaggtcggcatgtcagtgaccaagtttgacgagctgctacaagcgtccaagctgtcggacgatgcgaagacggtgctcttaactagctacgcgaagtattggttcaccaaccactttgttggatagacattattaactctttaactcttttaactctcactctttcagtatggttcagaaattaactcatgcgctaatattcgccgcctctgacattgttatcgatttgaaaaacggcagacactcgcttcactgaattaagaactccaacgcaaacttttcacactttattatattcatttgcatttgcatttggtagtaagttactactacagtagtaacaccagcaaggcgtagtaaaggctgcactgggaggacacgtcttacttagtaaagtattaggcttctctcagtgtaggatcggtcagcaagaagagctcaatatctccacagagtgatcatggagtaaaatggtgtaggtgcaagaagttttacaaggaagtacgtagtatttcagtaagtgcccagtaatgcattcctagaatttactactccagtgacgtagtctccttggttataccttgtccatcttccacctggtgagcactgcctcgcgctggtgctgagttggtccattgatcaacccaaccaaactcttcagccgcgtgtagcattcaagcactgaacggtcccgtctgggcttccagccgggctccacgaagcggacgatttcatccgtcatcaagatggcaatatcgacggcctccagcaggagactggttggaagttggttcacgaaagctaacgtttgcttcgtgcgctctttaatcgcccaactggccaaccttccgagtactagctccatccgctgagcatcgctacacaagtgcaaataggtaagtctacgctcataaggatagcagttaaaaacacgtaccccagtaaattggccttgacggtgaagttcgacactttgccagcatagagcttcgcaccttgaacaagaccccgaaacaacttgcatagtcggtgattgctgcgttcgcgctccgcccagtaagtcaacgtgttcataactttcgacacgtctcggaatcgttcggaagataaaatcggacgcatcatttccgtctccagcgcctggataatcggagggataagtgggcctcttttcgtgggagtcaagaagtttgcttcccacagcaggatgtcatgattcgtatcggcttcttcatttgtccttgagtgagtaccactaattccctgggccacgcctttcaggaaagtttgaagtctggagtgcagtctacagaaagcaaaatcacaaatagtgtgtgaattagtactactgtagcatcagcccatcttacggaactcacataccttctgacgcccaaagtcttgctgtcgttcggcaggttgttgatcggcgaccttatagcgttggcaaactgtcgaaaagcttcgaggtggttttcttggtcctcgcatctgaaggcccacaccatcacaaacttcaggatgttgggaccggaaacttgcaattggctgctcgagagctgcttcacgattttctccagctcgagcagtatcccaggcagacagttatttcgctccagcacgtcccacttgtttgacctctgccatgactttcaagcagttgtctttgttgatcttgagcgctgaggttgcagtttccatgttgctcttgttgtccgttgcattggcgtccacaactttttcgctcgacgtgttttggtgtgctaactttgacccattcgggttaagtatcagcgacgtgcctggcgtctgtagcgaattgctcgtgttctcaatggcatccgtctggtaattcatcttcgctctcttcgtttctgtacttttcgtctccaatgattcattagcacgtttctctcgtttgttgacattgtggctgagcagctcctcgccaggcttctggttagtggccgagtaacctgagccctccgcctcgcctccctgcatagtaggatcaagcaatgtcagtaacttatcagtaaaaaagaacatcgcaaagtattccatcctaccacagccatgtccatcgctactttcttgactattttcttcaactgctgccggagtttcgttgcgctatccagctccgcctgaaggctcgcgctgtgctctacagtcgaggagctgagcttggagactgcattgcgaacttcttccagtttgataaaagccgccgtcacaccgtctaaagcttgggcaacaccggaaaactcttcctgcagcacgatgttgtagctgcgacggagctcatcggttgacacgttcgccaagactcgcgcgttaagcgtatccgtccatgtggccattctccgaggaaggggattttacttgagtggtggtggaaatatgtaaacacaaaaacatgtgtttactacttggccaaacgaataacgccgaaggcaaatgggtacaagggggtattatagatatcctactgagtgggcgtaccttagcttattggtagccataatatacttgcttagtttgctgaaggtttctttttgaggccccatcttgctatctccgccatgcgcgggccccgcacttccagcagcatcgcacatttcgtcagtactttggagcattcgagcacagctttactttgccgtggattccagcctgcttcccggtgctgaatcacctcgtccagcattagaatgcccttatcgacatctcccgacgaggggcgttccctattgagctggcgacacgagctaagcacgtctgctgctctctcttgcaccgttgtcttgaacaatttgctaaaagccgcttcaatttttcggatttcactgtgtaatagcgtcaaggagttagatgcgacaacagattaaaatgaagggtaaaccgacgattagctgcgagagcccttaccgtgacagctccactctgcgtctaaggttcgataacttgtcggcgtaagatttcgaaaccgcagtgagactgtcatacagctcgagaagctctgagtcgcgaggatcatctcgagcccacttcacgatcgacctgaacactccgattatctcgatcggctgcttcagagaaacaacgggtgctgacatggcttcgctcagtgcattgaaagcctgggcgacgtgcttccttctttccgtgggtaccatagcagttacgtgccacacgtaaaggtcataactgaggagcacgtaactctttgcttcatcgctcacttgcagcatttggtgctcaacaacgttggacaacgtttcgccaagtctgaaaacagtagaatcataccagtatcggcaagtgcgaatgggttagaaaagtgctatcccatcctacatcaaataacaccgcttacctccttagaccgcgcacgtcggtgctctcctcaagctggttaatccactccaatacagcaccacaaaagttgcggagcgcttgtagggcgcgctcctgtccggagatcagatgagcccacaataccacgtatttcatgacaatgatggcatttgacaagccaatctcgggcatcactttcaccaatgcgggcagtacagcaggcaggcaactgctccgcaccagcacgggtagtcgggccaccttcagcacctcatctatgcagttttccgtgttcaaagcggatgtccaagatgcattcgtagtatcgttcgagtcactgccggcctcgtcatccagttggagaaaaaccttcacagttggtttggggggcagctgtatcgatgctgcattctccccgccgtcatttgagcaagcccccgcagactcgtccttcttcattctcttcgtacttgtatgtccaccctgtaagttatggatagaggggtacaaaaagtaaagaaacaaatcccaggtagaaatacctcagcacctctgccttgtcatacaacgggtattcaaggcgacttactgtagccatgtccgctagcaccgacttcagcttccgcttcaagttgcactgcaacactgtcgtgttgtccattgcttgtaccaagctctcgctgcggcttccggcctctccgttgctcaacttggccactgcgtctcgaacttcctccagcttagcaaacgcagctgaaacgtcgttcattgcgcggttcacggatgagatttcgtcacgtaggacggcattgtagccgcctgacagctcgtcctttggtaccagcgacaggatgcgctcatacagcgcggcagtctccgacgccatcattgacgatggtcaatattgactggagcgagatggtgtaaccagggttatagttggggtacacgacgttgaagtcagagttacagattgaatttgaaacattgtcagccaatcttccggtactaagtggtaagtagtaaagcagcagcttccttgatagggatccctattcatggcatcatggcatcttgagcgatggatttctactagttgctgtgggctttgtatgaaggttgtgaagcgctacgcgcaattgctggtgcacctgcgacgataaggaagacagcaacctcgaactgggatgataggaaagtcgtgccatgtggttgtcaatgctcgcatccagcatgcgaggataggatatcggatatgtttgttattactggtacgacaaccgtcatctacaagaaccaggagaagacatgtacggtacgggatcgagttgcttgtccgcaaagcgcgattggttcttccgctcactgcgcaatttgctttccgaagcctcaagcacccagcccgtcgtctctactatatcgattcaagatcatgcgtttgagtcatgttatcttcgtggcagccgctgctcttgtcgcgacgctggactgctaaactttccaagccgatcacaccgaactttatgcatcccgcctacggtaataagggcattggaaacgaccgtcgatccttgaggatgctcaaagctacttcttacgaagacgacgaagagagaggctgggggattcgctaaaggcgaatgctgtccttttcaggctgtcgatggcgcggtcggctgatgacatgggcccaattcttgctgagatcagagatggtggggtgttggcatctctctttgagaaggtcgtgcctcatttacacaagattctgacgaactttgaaataggcatggacgtgactaagtttgacgacttgttacaagcgtccaatctgtcgagtgaagtgaaggcggtgctctttagtgcgtgctcgaagtgttggtacaccaaccactagcatggacatgctgacaggcagctacataacgtaaaaaacggctttctcgattgcatcttgccactctttatgtgagatgtcgtactagctttcatgttttcccttcaccgaagtccaggtgtgtgactttgttcaaattcaggcgattccatatctaagtagcttgaatattcatgtacgtagtaaatctgctttgatttttattcagcaaggttttgtgatggctatagtgcaggactgttcgacgagtaactttaaaccgcccggcccatggtgtacagacagtgctgctagtgctagcgcttactcgaagaatttgtgcaccgaccacccgacgcatggtgtacagacagtgctgctagtgctagcgcttactcgaagaatttgtgcaccgaccacccgacgcatggtgtacagacagtgctgctagtgctagcgctcactcgaagaatttgtgcaccgaccactacatagacctcactctcctcgagatttcgtttttgtttgcgacgttgctgtttaccacactgactgtgtagaaagagttcagagaggggaatggtccctacatcaacaataatatattcttaaagcatgtaagcgcttcgaagtgtatcaaccgatcttcgagccgctgtcaatacaactaactacttcgaaggtattccacagcaaaatatatcaaagcaacatctgtactgtgtgtcttgatgaagtgtgcactatgatctctcctcggttgtgtccgccggtaaagtggtctggagatgacacatgtacagatttaaaataccgtcactcgctcgaattccctatggcttcttagcagatgacggcggcggagtttccatcttcctatcgctgccaaacgctggcttcgcgattgcccttcgttcagaagcattgtgtatttcttctgtgcgtcgcagcattcaagcacggcttcattttctcgcggttgccagcctggttcgcggtgttgaagcacctcgtctagcatcagaatgcccttatcaagggtttctgtcgacggttctcttgtgttaaggtgtcgagcccagcttaaagcgtctgccacttgctcttgcactttcatcttgggcagctcacaaaagtcacattcaatctttcttatctcactgttagcgttagcatgaaaagttagacatgttcccaactacattaactaaaatatgtacaaccttaccgtagcagctccactttaaccgtaagattggatacgttgtcggcgtaagctttagagtctgccaggagacggacaaacagttgaagaaactccgaatcgcggggaacacgccgaccccactgcactaccagcttcaactgtctcgcaatcatggatggctgcttgtcagaaacaatttcttccgccatcgcttctctcagcgcgctgaaagcctgggggatatgttttctccttcggttgggtgccatagcactaacaaaccagatatagtagtcgtagctgaggcgtacgatgctgtaatcctgtgaatcgtcacgtagccccatggcttggcgctcaacaacctcggacaacgcttcgttgagcctgaaattgtacaacgttagatgatgttcaagttatgccaaacaaaacaacaaactgtaccttctcaggccgcgagcatcgggtccggacgccggttaaacgatggcaacacagcatcgtggaagctgcggagtgcgttgagagcaccctcgtgcccagagcttaaatacgcccacaaaaccacgtacttcatgacagtgattgcatttgcagacgaaatcgcgggcatcaacttcgccaaagcggggagtacaacaggcatatgcttgctgctctccaccacagatagccgtgtcagcttcagcagcatatccaggtagttttgtttgttcaagctggaagcgctagatgcatccatgctgcaatcggtctcttcatcaagtcgaactaagacctccacagttggtgcaggcggctgcatcgttgcctccgtcccatctccacctttcctgtccgcacccacagaactattcgtttgttggagagagtacacaaggcggcgtctaacgcaaagacacacaacttgttaactagacaggaaatcttagactgaagcctgcctgcctcaagtgtgcactcgatgcggcactgtctaccatcactcttactcttctcacgtatacttgtatactagctatacagacgtatacatcgctgttgaagactgactccaacacgccctcctccgaagacagctagctacttcggaagatgctgtttggtcataccgatcatatcgttcaacatctcgaaccgctcgctaaccagcggcttcgtcatcagatcggatgggttcacgtcggtcttgaccttccacaactccatcgtcttcttggtctcgcacgtagtgccagcgcagttcaatgtgtcgcgtcctgcgactgtaggttgggttcgtggccatcacgaacgccgcttggttgtctattccaagtcgaaactccgtcttcaccattgggaagacttcggtgaggacgttgcggagaccttgtccctccatgcatgcttcacacgcagcaacgtactcagcttctgctgtggactgggccacaattgtttgacgtcgggatgcccacgaaatggcgcctccagacatgcagtgcacgtaaccggtcacactctttctggtgtcggggtcgttgccccaatccgaatcgcaaaatccttcaaggacgagagttctactgtcgttggtcgctgcgtccttcgagtacacgattccttggcttttggtacctcagtagtcgttttgctgcaccaatgtgttgctgggtggggctctgcacgtagcgactcagttggccgactgcatacgccaagtcaggccgtgtgcaagttgccaagtacatcaatgagcctacgagctcacggtacgggaacactttgccgttgcgaggcacttgcttacgtgccgccgtatccgtatcattcacggtgagtcttagtttggtctccatcggaattcgactcggatgtgcatcactgaacccaaatcgctccaaaatctgctcacagtactttgtctggtggattttgatgactggtcattctgctctacttcaattccgaggtaagtgttcaaaagtccttggtccttgagaccgtagtcttcgttcagctggttgaacatcttcttcttgaactcctcgttcttcgtcgcgcacaggatatcatccacgtagagcaggacaatagcaaattcaccatcgcggtcatagaagtacaaacacggctccgtgctgcatcgcttgaatccgtagcgaatgaaccaatcgttgacctctgtgttccactctcgaccggactgtttgagcccgtagagagccttatttatcatgtacaccatgccatccacctcacatggatatccgtcaagatcctccagatactgcttaatcgtcagcaaggcattgaggtaggctgtatttatgtcgccctggtaaataatcagccccaggaagatactcactgcgatgaacagtcgaaaagtagccatgcgtgcaacacgggagaaagtctccaagtagtccagccccggacgttgcttgtcacctttacctacaattcgcgcttgaaactcaggcacgtagcccaaatgatcttctttgagatcgtagacccacatggtcttcagtagtttctggtccttgggcagttcactcttaggtatcatcttcaacacgcccttgggcaacctgcttatccatagctgcttcccagaatggtgcatatttggaccttatggcttcgggaattttcacatcactagcacgtatgcctccggcaccgcgacgatcagtgtgtagggctttgaacgtcgagtatacctggtagtcctcaaagcgttcaggtggtcgcctctcgtgaacctcacgaaggcctggacgacgtggcgtagtctcctttacgcgctttgtgtccactttgttgcgtttccgttcacgtgtccgtcgcacgtcgacgtctctaggtcgtcggtgaccaatgatctggtctggtactgcaactagttcatgatccgtcactggaaccagtgctccatcattaccatcgttcacatcaccagcaacttcactcagctcacgggcatctgccggatcaaacaaacaatcgtaatctgcacctccacggagctccggttccacaacgtgggtcgggtccgtgatgtgtgcgattgactgggcatagtcttcatcgacttcaacttcatgttcatcttcattttcatcctggtcactgtagccactctggccttctgcatcagccgctgcagtttcactaaccgcttcagtgctttcattatctaccttcacattttcaggactaatctcagttgtactgttgttttcagcttcttcaggatccacctcggtgtcagaatcacgtcggcttcctgtaccttcgccctcctgcgtttcctcaaacgcatcatcatagtcgggcagggagctcgcacgaaggatctcatcccatagctctcgctctgcactgttttcgctagacacatctgcctggtgttgaagctggatagtagatagtctgctacgtagtcttccattccacacaccttgggcattctcatcctcgctgccagcaactgattcaacatcctcatggtcaatgttactgctcgcgcatcgttcagattcagcatcacaatcagcctggtgcgatgactcatcgtcatcatgatcatcagcagcgaagtcgtcaaactcgccctagttgatgaactcgttgaaggtctgaagccacttgttcaccttgcctttgtatccgctctcgtggcggtctttatacttgatcgcctcattgatcttcacatcggacacaaaacccttcttgtgttcagtggggaagtacacttgacaacccaccacgtcctcacgatacccgatcaagaaccccatcttgcagttcatcgcgaacttcttccgcttggattttggagtgtgacagtatgcgagcgagccaaatgctctgatgtggtggatgtctggttttgagccgaacatcatctcgtacggagtgcacccagcacccttacaaaatacgcggtttttcacgtacactgccgtctccagtgcactagtccagaacgatgcaggcaaacccgaatggtgcatcatagttttcaccatgtcaaccaaggtctgatgcgtacgttccactgggttcaactgcgacgcgtttggcccgaccttcgtatgcacgatacctttcttcttgtaccattttgcccttgctccattgctaaattcttggcctttgtccgtgagcacttgcttgactaagtttttgctggcttcacagtcatcatcttcactccattctcgagtgatcaccgtacccacgcgggtcccgtgctggcgctcggcccaagcaatgtactcctgcatgtgcttattcacctctccctcggccttcgacttcaagagaaagatcttcacatagcgtgagaatccgtccatcacgactagcacggctgagtattgggatccgttgttcgctccagggatcagtaggtcagcgtacacgatgtcgttcaccttctccattggcctgtcgagcttcttcttgaaagtctttcggcgttgcttgccataatgacagtcagcgcaatcaatctttcctcgacgcttgagcatgatacccgtcgccatgccgcgatcaaccatcagtcttatatactccgggcaagtatgtcctagtctctcgtgccacacatcgatgtcttccacactatccgtgacagcaaagcttgcgaacacgtgcttcttgactgcattcttcttcttgttggttatagcgctgccaatgttgtgcgcgttgaacgtccaaagatgattttcgtagaccgtgcgaatcacttctgtaccctcctttgacatcccgaacatccgcgcgtcagagtcccacgtcatctggaagccttgctagtccaggtgagaacaggttagaacctgcactggatacatacaatacgtcttcaacgagaacaaacaacatttgttcatcaatcatgctgcacgcataatagttccgaatccttccgccttagcacccacgccgtcagcaaaccccgaaattgtcgggttccagtcactattctccatgctctgcatcgaagtgaagtattccttgcacgctgtgatgtgtgcgttacttccagtgtcgaagtaccagcgagatggatcataatccttggcgactcgcttcaccacttcaccaacaaccacatcacgtttctgagcatgatcaacttcacatgtcccctgcgcttcctgttcagtaaacttctctcctgaacgcgcatactttgcctgcgctttccgtccgatgggcttctcctccaattcaggacagtcgcgcttgtagtgatctgttcctccacagagaaaacatccgccactacttgtctttccagacttcttgaggggggggatggtgtaacagggttacacgcacaagtggctacagtcacttgtaactctaacagacacgacgtctgttagaggttcgaaagactttctcgaccttggtgtagacacaccaaaggctacatacatttacgaccaccacgatagagacttaggattcctattggctgagagcagcatctcttagccaatgagcgacatgcatagcattggaattctgccaaccagccgttggcagattcctatcttagcatattacatttagaggaagtcagaaacataaaacaaaaatagcagttctcattttaacccaaaaacattatttggatcgtttatttagttttatctatactcggaggcccgagtataattaactctaatttaaactaagctacgcttcctcacatacacgcgcacacgtgtaagctaaagtagtgagccaaagtaggcccactacacctggtagcactttgtagtccgtccaacgaccgactacctgagttcgtacgtcaccgcacgaacgcggagctgagaaccttcccatggatacggaggtgtccatggaaagctccactacgccagcaactcacgttgtacgcgctgactgtccccacctgtcggacccagagtgggaagctctacaacgactgtcaacagtcattggtgaggcggctgtagctacgatgctgcgtacgctaacgccgacagagcaacatggtgttgctctgggattcatcatgagggagcagcgagatgctgcttcgtctaccacggtgtcgtcggggacgacaccgcgcgcgcaatcgctgaagctcagcgtgagcaattacgttggaagagagggcgagcctctcctccgttggcttgtcgaactcgacactgccattgcggctcgacgcatcgtcgacccgttgtcgaaggtcgcgttcgccatgtcatgtcttggcggacgtgcaagaagttgggcgtatggacgccgactctcggatcctacgtgctttagcacgtacgagggtttcaaggaagagctcagacaagcgtttgagccaccgtaaaacgagttccggtcgagggcggagttcctcgaccggcagcacccatggacctctcgagtgctgcaactgctggaccccagcagtcgcaaggaaacaatgtgcgatgctatcgatgcggtagaattggtcactttgctcgggagtgcacggcccccgtgcaccagcagggtggctatcgcggcggtgccgggcaccgtcgcaaccaaacaaaaaacgctggacgccagtaggcgcggggcgccctactggtaatgcagttccgcgtgtcgaccttggacacgcgacacggaggaccgcagcccccagtgaggttcattctcactgcaagaaccaagatgacaagcctgaccttgacatcctgaatgtgaactcggtgagagcaagcggctctctccgtgctttggtagattctggcgcgtcgaagaactttgttcgactgcgaagtctatcaaggcttgacttcgaggatttaaagatacctcgaaatatgttggaagtacgactggcaacgggtgccgtcgtgaagaccgagaagcggatggtacgcgtgcgcttcacttatgaagatcaagagtttgtcgagacctttatcgtcctggatctggacgataagtttgacattgtattgggcatgccgtggcttgcacgacatgatccggtcatcgattgagagaagcgcactctcgtgcgcttcggtcgcgacagcggaacagtgagcgatggccctgttgccgctatgcacacaccgacaggtgcgcgcgactccccactcgagacagcgcctaatgtcgctgtcccggagcgccctgggcgcgcgcgagcacgcgcgcaagagcagctagcgtcggcgttgccgccgacagctaatgaaggaaatgtgttgacctcggaggtcgacaccggcttttcagcgaatcaggaagagtctccgacttcaaggggcacggatgacgcaggcgagtcacacgcctcaggcgtggaggctgacgcgaatctgattggatcaggtctggccaataataagagccaaggtggcgtaacgccgtcgactccgggagtcgatggcttgggtgaatttgattcgtcggctcggggagccgacgcaccctccgtaatggagggctccgccaataacaggcgtcgaggtgaagatggcgtgtcggctccgggagctgacgctgcaggcggtgcggacggttgcaaacgtcccgcatcggaaaaacttgcatgctgtcgtgcagccgggctgcacgacgaagcgccggacgaccaagccgggcttgaagtcgctcgcccgcgggatgaacccgccggcggtactaaagaagaacacccgtccacggctgggcctggacgaggtcaagaaccaagcggagccgggctccgcaaaacaagaagacggcgcatgcgaaggtcgctgcgcaagtctcggcctggggccgagacgctacaaggaatgtctgccgggcagacggaggctgagaagccggacgttgaggcgttgaacgtcttgacgcgtacctgtgccgggttccggtacagggagatgactctcgctaaccctccgacgcaagcgtcggagttgacttcgcttccagtcatgagctggaagcgcttcgcgcgtgacttgcaagatggacgcgtcgagcaaatatgcatcctctcggacgccgagagaacgaagagcgagaatgaagaactgagacagttcttcatggagaccaccactgagagcgaggacactctcagtgcgaagacgaagaaggagcgctttgaagagcagagctgaactcgttgaaaacgagtccctactacgagatcttacgggagtacgcggacgtacttccggaagagattcctgcggagcttccgcaggacaagggaatccagcacgagattgatctcgtgccgggcacgaagtactgtgtcacgcggcagtggccactgccgcgacagcaggtcaaggcgatcgacgagttctttgagagtcgtcgcaaagctggacaagtgcgggaatcgaagtccccgcacagtgctccgacgttctgtgtcaagaggccacagggcggctggcgcatcgttaatgcgtataacaagctgaacgatgcgacgataccggctcagacgccgatacctcgaaaagatgttatcatcgattcgatggccaggaacactatttacagtgctcttgatctgcgcgatgggttctatcagatcctcaagcgtgagagcgatatccctctcacggctgctctgggagtggctggtgatgccgcaagggctgaagaactcccctgcgaccttcaacaggtgcgtgacgcaattgttgcgctcggtgcgcgacttcgcgccgagctacttcgacgatgtgttcgtccacagccgggctgcggacgggatgagcgatgttgagatgcacaaggtgcatctccggaagctgcttgcgctcatgcgcaagcacaagctctatgcgaacctgaagaagtgcatcttcggggcgagcgagatacccgtgctcgggtgtctcgttgggaagaacggtgtccgcactgaccctgagaaggtcagagtgatcaatgagtggccgacgccgtcgaacgtcaaggaactgcggcagttccttggcttggccacgtacttgtgcaagtacgtgaaggactacgcgggcatgatacgcccgctgtcacagctcttgaagaaggacgccgagtgggtttggactgctgagtgtcagcaggccttcgatgcagtcaagcggggcttgactgaggcgccgatcttggcggtggccgaccaagatcgcccattccacgttgtgtgtgacgcatccgacttcgcaatcggatgtgcgttgatgcagcccgatcacgagggtcgtgatcgtgtcgtctactatcaatcgcgtcagctgaagccagctgagcgcaactacccggtacatgacaacgagctccttgccatgaagtacgcactcgcgaagttccgagtgtatctactcggaagcaaaccgttcgtggcctatacggaccacgtgtcgttgcggacgactgtgaagtcgccgcacatctcgcaactgatggcgagatggctctcattcttcgcagagtataacttggacaagtatctgtggtactgctccctcgacatggcgagcggcttctgggtcgtccccatggcagaccgggcccggctcacctcagtcttcatcacgccgatgggactgtacgaatggcggcgtatgccgttcggcctgtgcaacgcgccgcagatttaccaacgcttgatcgacaacgcgctctacgggttcatgaagctgtccccggatggcagcactcgggatgtctttgaagacggcgaaccggtgaagccaggtattcactccgttctgggacggaggtcgtacatcgacgacatcctcatcgggggcacgtcgtgggacgacctgtgcgagaaggtcgaacacttgctggatgtctgcgagcagtggcacttgtccatcagtgtcgagaagagcgagtggggcatgtctaaggtcgactacctgggccaccgagtctcaggacgcggtctcgaggcgaaaccgaagaatctggagtcgctgacgtcgctcgagttcccgcgcacgctcaagggcctgcaatcgttcttgggtagccgcaattactaccaccggttcattgccgactttgcggtgtacgcaaccgcgctgtattcgctgacggagaccgacttcagcgagtacgtcacggatccagaagtccgcggacatgagaagtggacgcacgcgacgcgcgccttcgacgctctcaaggcaaaactcgccgagaccccaatgttgaagcacttcgacgcgaaccgagaatccgtcgttatcgtgtacgccagcgactgggccatctcaggggtgctcacgcaggtccacgacgaagtgtacatgcctgtgaagttcaccagtcgtacgttgaagcccaacgagctgaactacgacatcgtcgaaaaggagatcttggccctgttgcgcgtcataaacgagtgctacacgatgctagcagtgggactggtccgcgtcttgacacgtcacacgacactcgcctggttgttccggtccaaaggactacaggggcgactgtcacagtgggccgcgatcctctcgccgtggaagttggaaatctgccgatccatgaagggagaagaagaactcctcggcgcgctggccgcgagcattaccccgcgagccttcgtcgacgcggcgctagacgagatcgccccacggagacgggcgtccaggattgtagtcattccagtccccgacgtggcgcgcgacgatgtcttgcacgttttgagctatgacggatcggccaaggcgaagcgagaaggcggagcatacagtgccgtcatttggcagctgccgaactgggagatcgtgcgcgtcgcgtcgggatatgcgacggacctcacggtcaacgaggcggaatactgcgggctgctgctcggatgttctcttctagaggagctcgacgacgtcacccgactcgtcgtatgcggagactccaaccatgtcatcaggcagatgcgggacgagatggactgcaagtccccggggctgaagcagctgcgagaaaagacgcgaaacgcactccaggcatggccgcgccgcgaactcttccacgtacgacgagactggaacgcgagtgccgacatgctggctggacaagctctgcagcgtcaaggaggccgcaacgcgcacagccccgaagagatttaagatctgaagacgctgaatcacttggaagaagtcatccgaccacgggcatcgagtcccgggatggcgtctccagccagtcccgacgcggataatctcgactcggaaaacctcgactcggaaaatcgcgacgcgaaaacgcgcggcgcaaatgaccccgccgggaaggccatggacgcggggcgcgggacagcacaagtcctcgctgtgacgacgcgatcggctgccgcacgcacgacaacacatagggtccgacctccagaagtcctggaggggctgctggtgcaacgactgcgcctggacgcatccgtgtcgcccaggacgaagaggtctggatcgtcaacctcaagaagtatctccgcggcgacgtcggagacctatctcggcgcgaggtgaagaactgccaaaagcttgcgcctcagtacgaagagggcgaaggcgggctgctctactaccagctgagaagcgataattccgccgaggatcgcgatgtgatgatgaagctggtgatcccggagactcttcgggaagatgtactccaccactatcacgcgagcctggaaggcggacaccagggtattggccgcgcgtgaggcgccacttccattgaccagagatcttcagaagcgtccagcgctacgtcggcgaatgcaccgactgcgagacgggaaagggtcggccgaccatccagggagagtcgccgggcaacatcgtcgcgacgtacccgttccaggtcattgccatggaccatattccgtcgttgctggcatcctacaatggcaactcagagctgttagtctgggtcgacctcttcacggggttcgtcgtggtcaaagcgaatgcgtcacgaaccgcgcagacggtggccgaggcgtacgaggaggcggtgttcaggcgcttcggcgcgagcgaggctatccgccacgaccgtgagccgggcttcatgtccgacttcttcaaggcgttcagcaaacgcatgggtcagagacagcgagcgacgcttgcttatcgtccccaagccaacggtgctgcagaacggatggtgtagacggttacaagagcaatcaagatgtacatcgcagacgtcgaccaacgcgactgggacgaatacgccgagcgtcttaccttcgcgctaaacacgtcgcatgaccggacgaggaatgaaaccccgttcttcttagtgcacggctgggatcctcggtcgacgctggaagcgacgctggccgtcgggaacacgtcgacccgggacgctgaggcgaggcggtggaggctccgtatccagcgacactacaaggtggcaagggcacaagcgttggagttagtccgagaggccgtcgaagagagagagcgtcgacaaactgaaaacgcgacatgagatcgcgacgggctcgcaagtttggctgtacctggatcgggtgaagccggggtatgcgcgcaaacttgcgcacatgtggcacggacccttccgcgtcgccgagctggtcagcgcgttcgcagtgcgcctcgagacgacgcgtacggacgcgccggcgaccgtgagcgagacccggggctacgcagcaggcggcgcttggactgagcccgccgcgcttggtcctcgctgtcggaagacccggagccgaagagcgacgcgtcctctcgtgcgcgcgctgcagctgcagcggccgcagagggcgtagctgcagaagaggcctgcgcagcggcgttgtcggaagccgcagtgtcggccacggtagagggccgccgactacgtcgaagggccgaagaaccagacgacgtagcggacgccgctcctgacggcctagacgcgcgtgactgagaacccgaacgactcgacgcgccgtgtctaggtcgccgaaaacccgacgaggacgaggcagcggacgaagtcggaacaggacgggagcccgaaggacctgctggagggaaagcgccagtcgtcgagcccgccgtcgaagccgacgagcccgcccgggcaccagagctcgacgcagttgaagcaggaacaggaaccgcagatgccgcaggaactgcggcggacgtagaaatagcagggggagggggatcgcaccgtcgatctccggcgtgaaagtggcttcgagtcgcctgaccaggtcagcggtgtcgatctgcccgcctacacgcgttgcgacgccggcgagacgatcggcaagctcgtcgcgcacccgccgcgccagctctcggccccgacgcgcgtctcgaagaatccgacgccaagccacagcgcgttcgtcgcgctctcggatggccaagtcgcgctcctcctccagctcggcgacgcgagcgctgagacgatgggtctgcgcgccgactgctcctcgatgctgctgatacgaccgccgcatggacagccacccagctcgatactgtgccgcgcgagatgtggcgcaaagctcgccagcttgagcccgcgccatctcggactcggcggccacacggagagtcgtagcagtagccactggcctccagcttgtggatacacgtcgcgccgcggcggagctcctcggcgtgggccactaagagcgcgttgacgcgccgacggtcgtcctgcagcgggacgttcaggttctgggccgcctcgatctccgtgcggctctgagaaagcgacgcacgggccgcgcagagctcttcgtcgaccggggcgcgctgctgccccaaggcggtcaaggcctgacgagcctgatctctctcggcgacggcagcgtctcgccgctgctcaagggcggccacggatcgacatgcctggtccctctcggtgacagcagcgtctcgctcgtgtctcagggccgtggagtctcgacgcacttgatcccgcatgtcgagggccccgtcacgctcttgctcgacgaccacgagaacgcgggtcacgcggtcacgctcggcgagagcggcgttgcgctgctgctcggcagtggccacgagctgccgcatctgatctcgttcggcttcggcagcggccacgcgcgcttggacaggagcgagggcggcttgggcggctgcgaggtcgacgcgaaggtcgtcacgctcgacgcgaaggtcgtcacgctcggcgcgcgcgtcgtcgcgctcgccttgtgcagcaaacagccgcgctagcggcacggtggatggaggcggcgtagcaggagcgcgcgcgagttgggcggtcaagtcagtgacctggtcttgtgccgcccggagctgagcttgaagatcacgatattgctctgacgaggagcctcgctcggcgcggagtagagcctcggcagcgtcggcgcgctcagcacgagcacggaactcggccactcggtcctccaggacggcgtagtcccgctcggcgtgctcccgggagcggagcgcctgctcgagccggatcatgcctgcgcgataaccctcgcgagcacgatgcaagatcgcgagattgcggtcatgcaacacggacgcgtgagtagccaagcccgcattgtgcgctgagacgagttcgtactgggcgcgcagctcctggtcctcgcgctggagagtgtgcgcgtcggcgacaagagcagtcaccaagtggacgggggcgcctgaagccggaagctggacttggggcgccacggggaggcgaagacgatgcgcgccgagggcgcaaaccgcgcagccagcggcctcgaggtcttcggtatcgagctcttcctcctcgaggtcgatgtcgttggcgtcgacgtcgtggcggcgagccatgaagcttggagtaacgcgaagcggactgcgagggcagaagacgcgatggtgtcgagacgaagcgaaggcgcggggcaggttctgcgacgacacacccacctggggagtgcgcgtgcgtggcagcgggacgaatgtggtgtagtaccccgcagaagaagtgggcgcaccgggcgccggaggaagaaggcgccaggacacgagtgatggacctcgacgcggctgatagaacgcgacgcggatggatgggcgcgacgcagggccgagctcgacgggaaagtcggcgtgggtgatgggccgtgagacacggtgccagtgtaccgaacaggaaaaatcacaccgtcatattcttggcccaagacatcacttgcagcccaaggattcgcatgcaggaccacaacaaagtctttctctcggtccgggtgtcataacagcggcgtcgagacgatcatcttcttcagaatctcgaaagcctctttggtgcgccccaagtctcgtccttcccggacttgctcctcggtcagctcgtaaagcaccgatgctataacaggaagatcctcgataaacttgttgtagtagttgatacttcccagaaatgactgcacgcctttgagtgtcgacggaaatggcaaatcattcacagccttcgcgatcttgggtttcgctcgcaagccctcggcgctgatttcatgcgacaggtacggaatatacagcttcccgaactcgctcttgggtatgctcacggagattccccagtagcgcagtcggaacagcaacgcgttcaggtccgagcagagctggtcccaggcaggcgccccatgggcgatgtcgtcaatgtatgagcttctaccatggactgggtccattgaaactgggactggaatgttccggtggaaaacagtcattgtatctgtcagagctgggatctccactccagaatcggggaccgctcgctcgtctaccttaattcccagaaactcaagcacatcgggatcgaccttggcttcttcctcagacgccagtcgcacaaaaccccaaagacagttgttcagcatctgctggtatatcaggggtgcatttttcaacccgaagggcatgcgcaaccattggtagtgtccaagaggacagacaaaagcagaaatgagctttgccctctggatcatgggcaccgcccagaagccactcgccatatccaagctcataaaccacatcgcagcttcaaatccaatcagcaagtcatctatcaacggtagcgggtagcaagacagcttgatgagctggttcaccatccggtagtcgatacaaagtctgatatcgctgccgttcttcttcaaaatgattacgatgggtgaggcccactccgaatgcgaagtctcgatgagtccggtctccaacaattttttgatcagctcgtagacttggtggatgaagcgtggagcaatcggacgagcgcgctgggcaatgggttttgcgtccccaacatccacgtcgcagacaactcctctggcaggtgcggggacagcattgccatctcctaggaagatcgagtgatgatattccaagatacctctcatctccttgttcatctgaggagtggtcttgccttcgacacccacatcagcttcatccatgttcaccttcgggctgagatccttcaagtctgggagtacagccaaccggtctcgtaactgcgtcaacagctcggttccttcatggaagaagacttcttcatcaggatccaagtcagctgtgaccacccgaagacaaatcgcgtacgccacctccagctgctccagggcatcctcacagatcttgactggctctgcgcgaaacacgtccttcaattcatgtcgagcttcggcactactggtacctccaccagtcagtccgcggtcaacatcaccagaatcccgatcaatggcgagctccttcgcaggatctaactcatctgcctgcgaggcttcggcttcgtccatgggagtgacttccgcagcagttggaatgcccagatccagaatctttacatcagcaacagcgctcgagtgactgcgggcgtcttcctcagtctgacccgaagagctcatggctcggccactcgagttccgagatttctgtagctcagcagccttccagacttcttcaggtggacgtggcaaaatcttcgtcggtcaaacatattgaggtcgcaggacggcgggtggggcattccgttcggcttcaagtgctttcagctcctcccgtcgccgatactcccgcgaaggggtgttctggtaaatctcttgttgccactctcgatacttacgcgtctttggttgaacaaagcggtctcctcgtggcagttgcccaggctccaccaacgctgctaccaccgtgtgctgcatgatttgggtccacttctctgagatattgaccagacgaactgcagcaggccgccgtctggagctgtagatcacttgcgtcacccagtggttccctcgggcagtccatacctcagctgtgtcagcgtcagcttgaccataccgcaccggaacaatgatcgaatcaccaggagccaaatacaccggctcacgcacacaaattgggactaccaagatgtaacgtggaacttccttctctccaaccagaggaatgtcttcttcattcggaagcttagccaactgctcacgcgcccacagtcgtactccagccgctttcatgaaatccatacccagcagacaagcgactccatctccaatgtttccaacccacatgtccagcacatataccacacgcattcccagagttaacttcactcgagtccgcgatcggatgtacgtgatcactcctcccatacctttcaccttgagtccggcgtgcgacgtcaacttaagcttcaacctgcgtgcaaggtctgggctcaatatagttgtgctggcgccggaatctagaatgatgtgtgcccgatagttgttgatcgccccatgcactaatgccactgcatcttgattatccgagtcgtggtctgcccaccacccgtaacgttctcctgggttcaacgtgaattccactggggcttcatcttcaaatgcagaacctcggaaaacgttgtttcgagaaaccgggtgcgattccaacagcgattcatcttcacatgcaatggcagtatgcattgtgggttaccgatctggtgcctaagttctggaccgacaaatgcaagagcgcaatacgcttgggacttaggctcgacacgcactgggtccctacccagcgagcctagttgtttaacgacgtcccagacttagccggctgttctttcagcagttgcttcagaactttggtcggcaagtcttgcagcgctccttgtcgcgccaattcccggactgccttcaaagcagcacaatcggcacagagcccttcacggtgaaagtttccgcacttggaacataggcgactcgagcacttatatgtcgggtgtccagcttcatggcatcggtcacagatcagatcccgccaacaatcctgagcgtcgtgcccaaaactgcggcaattttcacagaagggagttctttgggagttgtctcgatatggagatggtggtggcgcttgtggaattggagggcgccaacccatctgcccagcagcacggaacacctcctcggtcgtcgggggtctgggtacttgaacgatagtctcagaagcctgggctacgttgatcttcttagaattcaccgtacgccccatggacgggggcggagttcccgggagataacgtggttctggtttctcttcggagtccgagggcggggaagccttgtcttctgactctgagtccaggttctcgaccaagtacgcacgttcaccttgagttcgacgcggaggagggaatcgactaaacctcacaccactaggcttcgcatcgcgggtctttggaggtggaggcgtctcatatccatcatcacgctgcaccgcttcgattcgcttgagagttttctcgagttccttcatcgacttgaacgtttgtccctgtagtgtgatcttcagacgacgatccgccagcttcttgataaagcgacggatgtggagttcccggtcactcggagagtcttcgtactcgacgtcggtcttcttggctgcagcgttgagtcgatacaggaacgatcgcgcagactcgccattctccggtcccaactcataatagcggttgtacggggacgcctcggtgcggcagtactccttgcgaaacagcttcgacaagcgcgaccagtccttctggtccttctcgggtagttggcggaaccatgcacgtagcggggcaagtagtcggcccaggagctgacgcaacttcatcttctccggccaaactcccaacgcagcagcgtagacaaaccgctcccaccagttcacgcggtcttcgagcttggcgtggggatcaaacatctccaccgccccatactggatatacgggcggaacgtgtacgattggccgttagcggctggtactgttgcaggggcgagttcctcagcaaggccgcgctcccagtcggagtcggagtcggagcccgagctggactcgctgctagacgagctgccgcttgaacttgaatctgacgatgagggatagccacctggtcgcttattgcgacggatcctctttccacgcttgtgtttctgggaagactttttattagccgacttcccagaatatctggggacatggccactcccactcgcagagtcccgagcgacacctttcgctgagctcttggcctcttccgagttttcttccttgactgcagcgacactggaccgagtctgtgtcgcagccttcggctgccttccacgcttggtctcacttgaccccgtcccgcctgtcgcacgtgtcttcgtctcacttgaccttgtctcacgtgtctcagtcagcttcgtctcgcctggtcccatctcgcgtttgacaacttgacttggagcttgtatggtcgcttgaagctgcgctgctgccagcgaatccgcggccacttgctgttgcccgatataagtgggcgaccgtcccgcaaatttgtcgcaggaagtgcgactcctcgcggtggcttttccactagattcaggtacactagtcgattgttgacgtaggcgagcatcattctcgcgttgaaccttctgggccagggcgcacttctgcagatacgcggacgtgacattgcgcaactggtcatcgaacgcggccaaatgggcattcgtgctctgcgcgatgccctcactctctgcctttacttcctcggctgccgccaacacagcagcggtggcggcgtccagggccgcactcggcaatggcgcttcggggggaataagtgtgccgcgccccatctcgggtgcaggcactgacgatggtactggggactgctctaccttcaccgcggcagcaacccgagcttcagcaacttcggcgtcgcgacggcgggactcacgttcggcggcaagggcttcttcgctccgttgaagacgctccatgagggaagcggtctgctgctggttgtctaggcgaatgtcacgcaactcggcagccatgtcggcgcgtacttggttgagggcggcctcctgctgcctcatcatgaccagggcgacctcggacgcgccggaacgcgacgacctcgaggacgacacacgagagtagattcctgacatcgaagacttggacgacgcagatttcgcggcggacttccgggatcgcgatgacttcccagaatgcacggacttctgtggtttcttctcagactccgggtccgcgacctttgtcgaagtggcttgagtccgtggcatagcctttgatgtggagacgccacggttcatgccggctgcgggtgtggtggaagacacgaagcttggagggggcaacgacgttggatgcaacctgggagcaggttgcgtcgagtgttctggctggagatttgcgctgctctctgatggctcgggcagcggtacatgcgcaggcgactcctgaaggggttgcagcgaaggcgcagggtgtgctgaaaccggcactggatacgacatagcacctgccgagacaccgaaacccgggtcggcagctgccgcagccgcgctctcctgcgcaatcataaccatcgccatcgggcttggtccaggcatatgactcaaggcactgccaaccatgcagtccgcggcggacaagaacgacgatcctgaggagctgtgccccgacaggtctgttccttcagcggccgcgttcatcgactcgtcggaagcaccacttggtcccaccagactaggaactgagtccacactcgccatcagctcaagacttggagttctagggactaggctctgagtccgaggcacgacgttctgggataccgatggttggggcaccagactctgggacgacgatggcggaggcatcagggaactgggcggagatcgctcagcttctaaggccgcacgcttgggcgctggttgtccagacgcgcttcaagcaggacttcttcgtctggtccgcgtgatcctcaagcggcgcaacaattcttcgccaagcagttccacagcgccgtccgtcattaggacgtctccatcggcagcagtcggggaacttgttcttcgctcggataattgcacagctgggagaggctccagcggctgtcggatgtgaaaccctacgccatccatcagcttgttccactcaagactctcaactgcgagtctgagttgaacttcttcaacacctcggcggatcagattctcagacacctcggacaccgcacggacttcactccacgtaggaatcacattgcgaaactcgaagccggcctccatcaacatggtctggagcacagcgacgcatgcagcagccggaagcaacttgggcgatacggtgacggccttcatatccgagaccagcggttgccgtctgcgtttggcagacaacgccttgatccaagactcggaagtccgaccagcgttcacaagacccaagtatttcccagtctcgaatgcggcgaagacccaagcttccatgtcgtactcttcttctccctcgtcgtagaccacgtcgactggagagatgacttctcctggaagagagctccagcggctcagttgttcggctccatacgctcgggcttcgtcgtcagcaagacagtttacgtcggatcctgggatttcactcgtgccccgtggaatcagcggaagcggatcttggaacgtcaagtgcagcgtggttggcagttcaggtccgaagacacgagtgccaggagcaggcccaagacgtagtggtgcaccggaatccgggaccctcgtctcgcgccactctcgcagcgccacatgatcacgttttccaagagcgcttgcagccgcagggatcagcgccaactccgtcggcagacgtgctgcttgagcgtcggaaccacggtctaggggccgtcgagggctggactgcacagaacggggaaccatcacttgagaagctcgtcttggtgtcgaatgggtcgatgatgggcgcgctggttcggccagcgccagttgttgttcggtctccgtcgacatcgcaggatcttgtccgggccccggaggcgggacagggagttgcaacggtcttgacactcgttgagcaccttgaccgcgtccacgacctcgtccgcgtcctccaggactcgaagcaggcacaatcgcgttagcgttagtaggtataactctcacaatgcacgttcaactcccaacccctgatccgggcacgcgcaccagctgtgacggggcgatgcggtgttttctcccagaaaacagttataggccctccttgacagacctcaggctactagagctttggatccgtctcggctggcacagggtgtgtgttgtccagtacacgctgttggtcaggcgcacgatgtgtatcccttgggtagcgtttcttttcaccaggaggttagtatcgaccccgtgaatcagacagctacgccgggctaacgctggaacaatccaacccgaatagagttatgcatgttatacaatcacacaaatacttctttaccctctcttctttctctaggcccaaggctaaggccaaaatacaagtcaactggtccaaatccaagacacttgatcaatcttggggacgcacaccacctctcggggagaggaaacgatctaccctgtcgccaacttcttcagttcgacagaccgcaaatatacaacaaagacggtctgcaatccgccaaatatacagatatggaatagatatgatcacctccaggccgaagcagtggatcacttacctaaagtacttcgaattttgtcgtggagaacggccttacaggctctgaaagaagcacttgtgcccttcgaagcaaaacgaactctgtttggttaaaggtcacatgcagacgaaatctttcctaagcgacccttcggagactgcgatctttctgcggagtgttggtctggccttgaagggtcgccaaactggataccttctcggagttgttgggtacacctaggaccttggaaggtgccatagtgaaaccaagtgttcttgggtttggagcctcggaacgcctcaagccgaggtcgttcttggaattttgtgggaggtaagtctgggaacgcgaagtctgggaatcgttattccgggaaaacaacggggaatctgggaagtgcctcagctcccaggttgtaagccagagtcgagttccgccgtacttagatatactggggaggatcgctcgcattccgttgcacttcatggaacgggatcaactcgcccacattgatctatcttccgggattcagcgtccattcgcagacattacccttgtttttataggagactccaaatcatccagtatcaccaagctctacatcattgggacatcccaggttcaggtgcattcacccgaacttagggatcgacaccgcgtcacatatcgatacagacagggtccaagttcgtgtacctacatataaacagaaatatggagttaaatcgggatagttaatcacggtaaaacaaattgcttctaacgtaccgccgtgtcgttcgattctcgcaaaaggcaagtgggaggttgctcatgacaacccagactagccacccgtagaggttttgcgaggagcggcgcacgtagctgagcaatggccccgtctctgctgtggtggcctcaagcatctcggcctcgaagttcggatgctcacgcctcatgtgctgcatgaggttggtaaacccgttgcggcgggtctgctttcgaaccgtgccgcagcgacaacggaagtactcagggataacttcgtcgaagtcgtcgcgggacggttggaaaaagaaccctgtggcgtgaacgttgggcgcggcgggcgggacacaaagcccatagctgggacgactgagttgctggggtgtaggctgctggggtttttgcaaaatgaacaatgacaacaacaggcatttgaacgcccttagaggctgccaccagccattacaacggctggttttgaaaggccaatagttttttaaggtaaaaacgatgatacttagtaggattccagattaaaaaaatatgatatatagtagggtataaattgtagtcataaattatgacattgggttgatttatacagcgaatacgcgacgtacgcggagttgttcatcgatcaactgccgtcatcagtgaagaagtcgaaagctcaaaggtaagaaagttcgattatttgtggttttagacgatgataactaacatttttaatttgtgtgcgtgccagaacgatccacggcctgtcagctacatggagcagtctaggggtgccatcctttgctggcaatgaggggtcccagatagcccccgtcgctgtggctgcgccagcaaaccgcgacagcatcaacgtatttacggaccttgtggagcaggtcgggattttatcgttcgaggggcgaaaaactcggatggaagaggtgcttgacgcgttcaagaaggccgtgaaaatggctgcgcgggctcccgagatgaagaaaatagcgcaagctatgacgagaattgtcgtttggatgatgaacgaccctcgtgattgttcactcttcgacagctaccgacagctgtgcgccataatcttcagcgccacaaagtggatgacgaagtcaaagcagaagacggcacttcagaggtacgtggcaaccaaaactattgaacctgtttagtatggtctgtgccaatcttctcgctggtttttgagtagactagcaagagcgatatcgaaatggctcgagggcaaagatatcatgacacctcaggaaattgagacgatgcagaagcgagtgaaaggttgcggctcaagtacgagagctgccgctgaattgtgcgctgggggagattgatgcggttatggctgagatggaaaatattgtgcagtgctcaatcattggctggtcaccgaagggaaacccccagctttgtgagtgtgctgtagaattagaaaagcgcatcagcgtgtggaaagctcgacagaaccgcgtggtctccatagcgaagtggaggctcactaatctcaagttgtgaaaggttttgctagcccagtttcctacacattattacgacttcaactcgtgcgtttttgctgtggttttcaagtaaaacttgtttggggtcctccagcaatgtcttctttttctcccgcatgatttttttttctcttggtacttaggaatccaccctaccaaatgagaaaaaaatcataaagaggccagcacttctccgatgatacgcacctttctggtgccatctcggtgacctggatggtcacgtcgggctacacgatgttgaagccaaatttatacagtacactgtacatcggattaaccgcttcgcaatcgagactctatctgctgatgcgtacttgggggtttgaaggatctatctgaggtacgcaatttttgcattttgcacaaaggggcatgaacggcactgataaaccataattgctgaagtggagagataagtctccagtttgcaatggcaatcatgaaattcgggggttgctgatggtctgccgattcgaacaaaagatcgtgtcaatttggatcttgctcgatgcgctacagaaggccgacactgcatacttagtacaatagagcaatttgaagtgtccgatttccacaaagactgctcacagtagctccatgttcacatgtcaatctcatatttgtcaccctcactttcgattccgtgatcgtcttcatccttttctcgcatcctgcgagagaattgccatttccgccatacgctgaccccgcactattcctgcttccagcagctgtgcgtgctccttcagcaggtcgtagcattaaagcacaacttcgtgtttccttggtttccaatctggctgcttgtgtcgaatcacctcgtctagcaacataatgcccttatcgacatgctctaccgagacgtcttcctcactgagctggcgagcccactccagcgctgtcaccgctctctcttgcaccgtcgtcttgaacaagacacgaagggtgccctcaatctttctaatcacactgcagcatcgaaacaattgtacatgttagtcaacacttacagagtacttgccaacaacaacaatcgaatacacttacccaaccagatctatacagatcataaagctcgaaatactatcggcgtaggatttcgagacttcgacgagctggtcgtacaactgaagaagctccgaatcgcgaagatcatgcagagcccatttcacaaccacctttaaggccttcgatatctcgaccgcctgcttgtctgaagccatttgacctgtcatttcttctttcagtgcaatgagaagccgtgggatctgcttcattctttcgtcgggcaccatggcatccagtagaatggcgaaaaggtcgtagctaagacgcacatggtctctcttctctcgactattttgcaagttctggcgttcaacaacgtcgaccaacgtctcgttgagcctaaaacaacaaggttaacattgtgtcgagaatttctcccaatttgtaaatgtaatgcaacgcataccttctcaaaccgagtgcacgtttagggggccgttcctggttaatccacggcgacaaagcttcactaaagctgcgatacgctgcgaggagatgttccccttgggatcctagatgcgcccacaaaatcaaatacttcatcgccacgatggccttgttgagggttatcttgggcagaacttccaccaaagcgggcaacacaacaggcacgtggttattccgctcctggacggacagccgcgtcaacctcagcaccatcaccatgcagttctttttgctgaagttgagagcgtccatggtgctcgtatccgtcacggcatccaatcgaagtagcacgtgcccgattggctgcggtggcttcatcgacactgcattatccttgctgtgtttcgtgactacatccccagactcatccgtcgtcttctgcttattgcttatatgtccctgtcgggacaccataaaacaagtgtcacctcgagtagaagcataaggaaagatgccgtaaatattcgccccacttactgcagccatgtcgcctagcactgacttcagcttccgctttaagttgcgctgtagctccatcgtactggtcatagcatctaacaaactcccactgcagccacctgtcgatccgttgctcaacttggtcactgcgtctcgaacttcctccagcttggagaaagccgccgaaacgtcgttcattgcgcggttcacgggcgagatttcttcacgaagaacgtcatagcgacaagatgcgctcatacagcgcggcagtctccgacgccatcattggcgatggctggtgcaaaagatgctgtaacctgggttatagtcggcgtacacaacgttgaagtcacgcggtacaggttacatccagaagtaacctgggtacatactgtacagtgatgtactatatagtacatcatcgctgtctctgagggtgtctaggggtactcttgttgctcttatatgggatggttgggcggatgttgagcggacgacgagcggacaagacgaacattctcgatgctcattctgggacaagacgacaaaagaaacatgagcgttgctttctttggggacggggactcatactcgtcacctgcagtagctacgcggaaccaccgccgcgcgccaaataaagctgtcgctgcgacagacgcagtcacaccggcgtcaatgactcctctgctctccagcatcgatcgcatcaacgctgctctggaagctgcactgacacagcctccaccgccgaccgggacattgcgtgtgtgccacgcaacggaagacgagtggaacgcgtttgctgacagcgaggatccaatcgttcgactcaattatcttgaatggtttgccgacacggaagagattcacatcatcgagtttgccgacgctccccacgaaaaatacatcggggagctacacgatcaatttcgtgagcggcatgtcaagcgatggcttgcaagctacatggccgccaagaattctcaagggccacgatggtgtccagatctcagttatgggccacacgaagacacaccgcactccgtgcttccgccaaacattccaatttttgcagactttcggacgatcaaggttgaaattggagtttctcagcagtggggcatggcaccaggagagctcgaccacaaggcgatggcggtatgggctgtgatgccaggagttgagtacgtgctgtgtgtgaaattcgagcccgactttacgaatgcggaatacaagttgtatgatgctcgcgtcaatccactcgtgcagctggctccactcccaatcgtcgctccaagaaccgtgatccagttggacggacgtcgaatccttggtattccaccagggatggcgctcccggtagggtttcctgcaactctgttggtggatttgtactctccattggtctgtgcaatgcgtcaatagacgtccagcaatctaatctcttgcgcagcaactgccgagtcagaataataatctgtgattgcaccatttaaaaaaaaggcaagaacacattgtgatcctgaatgagcgaaaatacggaggttcaaatggtggccacctcgattctcgttatcagaagcgacgatatcagttatggaacacatcagttgttatgaattcagataaatgacggccaagtgtccatgtccagctccaaaaaaattccatttttacttttacactattttttactaccccctcctacccccctttctttataatattttctataagaatacagaaaaaagctggacacctggacactaataacatacattgatctagaactgatatagtcgcttctgatcaaaagaaagctggccaccaaagctggacacacgtggccactcacctggacagcaacttaatgctcgacatctcagcgcaaccagacgatgcaacaccccctgttttcaaccaaggatacaaaaaaatacacacctggacacacttccgctaaagtgatgggttcatagattgtaatactgcgacatcataaaaaaattatgatcttactgatactttgcttgtatctgcgcaagggatggtatttccactatataaaccttggctggagaagtgttcttggtgatgcgatttaagtcatccagagtaagttttgactcaactatgacttctgcctttgatttgggagttggccatgcgtagtagttctcatcaatgcaaatcggctctggctcgtgcgtttcaatatattcaacattcattgcttgtgtatattagaacaaagtaagtttgtattacatctcgagctcgcaactgtcggcacttatcataatgtgctctccatatttgaatggatgctcacgacaaagcaattgatcgacctgtaaaacaaacgcatcctcgtctaaatcatagcaaatgaaataacaccagaaagcttctccctgaccaaacacctttacaaagtacttgtcataattttcgtattcgtcgatgatcttataatccaagtttgtaagattcatctctatataaatccatcaaaaattattactggcctagatagtaaagccacaggacgcaatactgcccacagtgtccaaatcgagggtcctgaatatcaacttcgcgataggaataatcctttggtatcacacgtggtcttggtaatcctagagggtcgaaataggccttatctttgtttgagactgctaaccaatgcgtcccgccgatctgaggcgttcccatgtttagaatacagtaatccttgtttctatttatatgctgcttgaaatcaatttgatctactttgacaccaagggaattggcaagtttcatgagttgatcatctgtcgttctagacaatttaataattcttttttcgctcatggtgctttattttttcggcaagtataatataatcgccatcaatataatcgcataaactatgtcttccgcctcagatatttctgcttttgagcattccgttgaacctgctccagctgagacgctcttcaaggataaaaaatggacctacattcaggattccacatctaacaccggtcaatatgccggacaaattcaattcaatctttctaccatctcgtctcaagccgcgtttgtgaattgggaagaagctgtcatcgagttgcctgtcaagcttcagattcttaatgctggtactaatccagtgatatctactgctgcctgtaccattgatcaattggtacctaaggccggagcatggcaattcattgacagcgttcaggttgttattgacggaaccactgtacaaacgaatcaagttcatgagaatgtgaatacaacgttcaaggctatcactgaaacggattataatacttacgtcaaacatggtccaacaagcaactttgtattggatgaatattctactccaacgattcaagggtcaagcggagcagcgcaatcgcttgataacttggccacttcgtcgtttatgacagctacaaatagcatcggtgagtttggattggctaacacctactcgaaccgtggagccgctgaacgatcgctctttaccgctcttgaccaacaaagctcgaaacttgcattcgatgttatgggaggtagttcaaaccttcaagccgtgtcgaaaccacaagtctatgtggctcctgctggctccgttcctggtgggtcgccattttacgtcgcgcattacttggcttgcattaagttgcgggatatttctgactatttcaagaaatgcccaatgcagaagaatacgcgcggcttcatttacctcaattacaacagctcatctactactttgattacaactggcactgctggcgttgtggctccttctactattgctagtttgagcaacaatatgaattttggcaacacttgcccagtgctgtggaatttaagtagtggtgcaacgacaactgctttggccggtggccttgcgcttcctgcatctgcgatcacgcttacaattactgccgacgttaatggaaccccaactgcaggaactggtatcactccatcgcaatcattttcgcgtcttctcgttccaacgtactcgcctaacccaagcgccgatcatgcgttggctcagaagaaaacgtttcgctacttcgaacgaatcacgaacaaattcactgttgctccaggcgcgtccttcacttggacggtcagcaatggcattgctaatccaaagcgtttgatcatgcaacctgttattaccaatccaacggcaggtgctactgtatccgatgtgatcaatccattccgtagtccattttcgacagtaccagctacgacaagtccatttgctgcattgaaaaatctgcaaatcacagttggaaacgtccctatctggaacaaccccgtgagttttggatatgatttgtttgtacaagagatgtcaaagtcgggtgttgatggtggtctcgacgatgttatctcggccggtttgctgtctcagcgacaatgggaatcactttatcgatttgttgctgtagatattggtcgtcgtctcccaagtgaagatggtgcgagcaagagtattatcgtgtctggtacttccaactgcaactacgctctcaccatttattaccacgtattgcgtgaagttgttgcaacagtcgatacggctatgggtacggtatcgcaaggaccagttcaaggttaggtatcgcaaataccatatcttcaatctaattgttattaaacgattttttttaaacagcttcaatatacgctacctaatcgaaatcaatcatgagtggttttttctccgataatcagacaaagcaaaaagcatacgaccgctattacaatgcaatggcgaagagtgattttgttcaaggcaaaaagctgaaagctctaattcaaaacgagtcgttggatgatgcaagtgctgattcacttgcgaatttgtttcagcaagtgatggcgaagaatcgtgagtacgactatgatcaaatcacaaagaaactactcaaaggtcccaaagggcctcctgaaatcatcaaaggtgaagcacatgaaactccaaaagcgagtacaaagaagcatacgtacgttccgcaatcaactgacgcagactttaatatggacgagcccactgcacctgaagattcatccgacgatttctacagaggagtaaataacgttgcccaaaaggttatcaatacgcgagcatacattaagggaaaaaagactttgagacaggtggtagatgatcatgttcgaaattatcttaacaaacaaagagagttccgacgagaggattctaaccggagacgccaagaaatggctagtaagtttgctgagaaagtcatggaagaatcggaaaaacttctgaaacgaaaacgaactgcaactcccccaaataaatctcccacagacaaacgagcaacaaaaaaagctgctaaacgagctgaggaggaaccctcgattactcgacaactttttcaagactcggatgatgcagagagcagtgatgacgaagaaataaaagaagagaagagattacgcgggctgaatgctggtataaaaaaagtatatactgacgacatcaacagctacaaaagttcatatgcaaataacctgtacgaaagtatccgacaaagatttggagaagctattgaggcgcgcaagggcaaagcctattttgaagacaatgctcctaagccgccaagaaagcacaaaatgtcgaagcttgctatgaagcaatacaaagaggaactaaaaggctggcttgatggaatctttatttaaactgaacgttgttcaagtaattttttttctaactcattcactttttttataagaagtttgatggcagcagcatttaaggcgccaagttgagagtaatccagagtatattgatatccttccagatcgttgtcgccttctgctttcatattttcgtttggcataatgctgaccatttctccacacactttcattgcgtcttgtgcgatcagaccaagcttaggcttgctttctcctttccatgagtagataactggctctaacttatcataatgctccaatgtaattgagatcggcgtaatattctctttaagtcgtctgtcagagcttgtgtaaatagattgcgagcaaaatattgaagatgaaaagatggcagacactgtaatactgactgggcctaaaccaagattgctccaaatatttccttgcacgttgtactgataacaatttgatgttccaccgacaccaactgtgtatgaatttgatcctgatacgtgcaaaaacgctgagggagacccagttccgataccaactctgccagtcgaagttattgtaagtcttcgtgtgtttgcagtcatcataaccaaatcgttgccagtagtagttccaaagtatgcgctattagtcgaggtcgcactcgttgcattgttcatttgtaatccaaaaccaatgggcgttgcatttgatgattccatgaagatcggcatatcgtagttagcagttccatcattgagtgcattagatgctttaatatagacattaccagagtttagtgtgagaggagcagtcccaaatgaactagtgtatggcgtattggtgttaaatatcattttattaacagtatcagaaacaaggtaaagacaaccacttgttggtgtaggcgacgatccggaaggatttatacaaaaagcatccgctgaggtagcaagggtgtatgtatgagggaaaccacttttgtaaggctgtgaatttccaacattgaaacaaaatcgatgcgtctgagatgtgaaacccacggatggcttgtcattccaattgatattgaataaatccgcacttgtagctgaaacaccgcctacgaatgagctaggattatcagttgatattaaattcaacaccggatacgttttgttgtttgatgttgatgttgttctcgatgcaatgaccaatccatttgtatcagatactcgataaatgttcatcgtttcacgattagctgtatttccgtaaaaacgcaaacaatttgtactcgacgtgcccaaaggcatcaagcctacaccagaactatccaatgtcattgttttagatacctgaaacgccccaagagttgtaatatcgttgtaattgagtttagcagcagttgatgtcaatgccgctccatttagattcaaattcgtgtagttgatgttgagaccagcggacgtattgatcgtatcaaccgttagagttggtgatgccattgatgtagaagctataaaggccccactaattgaaagattattgatcccagacaaatctaacgttgaatttaataccagtgcctttgaaggtgaagctgaacctagagtaatgccagtgtagtaagtatcggggaatgtagttcctctaaatgttaagtttggcacatttagacccgttccagttgaacctagatctaattgtaatccagaaatggtatcagcaacggtaatattcccacttgacgagatagtcattctggccgtgttgttagttgcaataacagtattatgattcgactgtgttccaatccaaccattagttgcaagtccgcatcgaactgttccatttgcaacttgaattccccacgtatttgcattggcattgattagtacagaatttgctaaattagcgttttgtatagcattgactgtaagagttgccaaacttccaatcgacgaaatgtttggctgagcagctgtttgaattgttccggtaatacttgtagctgataggttattaataccgctaatattgctgcttgaatcaagaacaagcgctttgcttgcactggcggcaccttgagtaatcgacaagtacaatgattgatcaaaagtagttccattgaatcttagcgatccagtgttaattccagttccagacccacctaaatccaattgataagatggtagagttccaatgccgacgtttccagttgaatcgatgaacattcgaaaagctccgttatgatagaaatacatcgtattaggattgcttgctgaactacctcgtactccaatttccccagcataaagattgcttgtaaattttatattggcttgggcagcagcagaactattcgagattgatactccattatttgcagttgtcgaaacagaaaggatactagttagagtcccaagcgatgtaatatttggttgtcccccagcagtgagtgttccagtaatacttgtagatgaaatagaggtgatacccgtgatagccttaccagaatctaataccagagcctttgaagcttgagcggttccagcagttatacctgaaacatatgataatccgctcaagtctaacgcagctccaccaatcgtcagagaaccgcaatcaagattgccgatcacgctcaatgcagataacgttccaacaccaccaagccgcaagtatcttcgatcgcctgtagttaaagtaaggtagccatcggatgagttaaagtaagagctattgaataaaggagaattgattgttggaggcagagacatttttgatcactatactataagatgcaaaacttctacgagtcaattccaaagaccaagctcaagcgattccccaagaatcctcactttgagctgccctttagaatggttgtcgcgagtccaagtggatcagggaagtcgaacactgttctttacatcattgcgcttcttagcaaatgctttacacgaataatcatttgtacaaagaccaatgagacgctgtatgatcacctaaaagatactatcgacaatgtccaggtgatcgaagaaggaatggtcccagcaatgagcgaatacgactctgaaacgagcaaattgattatctttgatgacctcgtgttagaaccaaagaaaactcaagctcaaattggacaatacttcataaggggaaggaaggccgcttggagcatgatctacatcagccagagctactttggaataccaaagaccattagaatcaactctcagtacgtaattcttgggagaaatttaacgagccgcgaccttggtattatctgtcgcgacttccccactgatattccgatcaaaacatttattgatctttacaaacgcacaacatcagagaagatgactaccatgctaatggatatcactgatagaaaaatatatcgcaatgtcatcgagtatgtttgcgacttgtaaaaaaaaagaagttagtacattagtcagtgaaattattcactactacctttttttggtcgaatcaacaaacgaatacatacgttgttatcaatgataccaagcgggatcatgttctgatctagaaatgacaaagtcaattccgaattagtaccctgcattgggcagtaggctaatccttgtccctgtgaggtggttatgagtcccccatactcaaccccagcagacgtaaatgtgtgtagtacttgattattgtttgcaattggattgtaaagatttgaacaagtgatcacgacagcagctgtcggatctatctgaggcaccaagttgctattaactgcataaacactagttgtttgagcggcaggatatgtagctgggctgaatccaatgatagaaccgaacgcagaattatctacttggagctgaggcgtgtatgcagtagctggcatcgttggaaatccgctagcagcagtgtatcctgtgatattcttgactggttgcatactaaactgcaaggcataactcgatgggttctcagcgcatgaaatgaaatagtagtttgttccagtcgtattgttggtcaaatagagattgttttggattgaccaatattggaggtagttattgatgtcgcttgccgagtatgtgccatcagggagcgtaatcgtgtatgtcgtcgtagtagaagcagttggccatatgatcttaaatgagttgttttgacgctgagcagtaattgctcgccaggagtagtagatggatattgatcctagtgcaatttcgtactgactgaagtcgataggctgcgagaatcgatatcggaactggtgagtagccacttggttgtttagatttaacagaattggaaagctcattttatctacttgtatatactatccaaaagaaagaaaaatgcatcgacgaaagagaattcgacgacaattaatgcctcaggcaatggagatcgatggatcgggcgaggtagatcactcgaaacctgtagctccatccagaaatgactacggctcgacaaatattgaaacattgtccaatcagcttcagaagatcagtgttagtcatcttgctaaggaacaaaaaacgaagaagaaacctcgttatatcgatacctcaaagttgcttaacttcaaacgcgagtctaagagatctaaagcttcatcagacgcttgaattggctgtagtaagatgccgaaaagacattttttttgtataatttgtcaaggattgacttcatttccgtttttatcagtagagaatcatcgccaatgttttttgctccttcaagcatcttcaagcgttttactaatccatcgagaagttgattgtatgaactatcaaactgccttgaagtaatcttacatttatttaggcaataccgcatgaaatctcgctcatgctcgtcgagttggtcaaacaacgccttatcgtattgcctatcttctctaatcagccaccatagatctacaaacgcatgagataccagcattgttttgatatttactctggatttgtcgcttcttaagcaagcttgaagtccatggaattccacatggaatggaccagctttgcgatatgttctcttttgtttttgctccatgatcgctatgtatgttatatcaaataaattatttctcaaagatgtcaatctcaagcgttttgtcgctaccagtaggtgtgaaggcaccatggaatatgcgctcccgacggtctttaggtctgcttacgggcattgcagtgggttttgcaggaggctttgtaggaggaggtgcagtgggctttgcaggaggctcaggtgcgtgatcgtatgaatcgtcaggttcaaatgatacttcggaagcatttgctcggttggcaatcttgttgtagctcgtgttagctgccatagtgctgtgaagtagtttggaatgcagatcgttcttctcgcgattggtaagtttagcgtacgctggcgattggatcaaatgagactcagcaatgtgccggatcatattcattgacattggctttccattgtacttcatgaagagcttcgatagcacttgactaaagctattgcttgaatttgtgtaatcgtactcacctggctgtcgattgaaaatccgccatagtagtttagtaggatgctctccaactgtattagtcaagaattcgagatatgacttaatcaagttcatcgttgtactatccaattgaatcgtttgtggtcccatcagacgaacatttttaaaatcgtttaggtgtaatatgttcccttcgagatagtttgcaccttcttctggagtgagaagaacgctcggccatactaaacgaagtggataatgcacgttcaaccatagtgtgatgtaatcaaacacaatctttaagtactcagtcctcttagctttagccagctcctcaaactcggatcgagatagaaatactttgccgtacgtttcggtgagcaccttatgggctttaccaggaacggacatcagctcttcatagcttatgtacttcttctcttcttctggcgttagttcgttgtccagctttgcagctttgttttgcttactgagttcctttcgaatcgcattgtaatatccgaatgcatcacgaaatctgttcttgaccattttacacatggcgttcagtgttagtatgagactctctttacttgtatagatgctcatcagaagcgcaatgatactcgagttctgaaccttaaaagtcttttgaaacgaagcatcgtcgtatttgtttggatactggatattggagatgaactcatttggggaccattgctgtttcgcaacgccggccttgtaaagcttgatcagttgtctggtgtatagatttaccgtagtgtctgacaaattatcatactcgcttcccattctgatatcacgagtaatattatttttaatttcatccagactgagtgttttagatttattaaccttcgacatttttgtctctcgctctgtatataagtagcaccgatattcaatttagatgtacaaggaatttgctgtcgatttgagccacgcgcaggctgttaaagtcctacatggcaaacccgttcgcttgagtcattctcaattgaacagaggccacacacattatttccatcctgaaaactacaagaagttggtaaaggcatacgaagcgggcaaagggacaacattacatatgtctcacggggaagttctacgaacacatcaatcagggcttagtggctctggcttctggggtaatctttggagtggtatcaagaaaggtgctagcgctgcttggaactttctcaaaacaaattggaagccgatcacttccggacttttggatggtattgctaccgcggccggacctgaagctgctccattgcgtggtttggtgaaggatgtgagcggtgtgggaatggctcctcccatgactcgtcgtcgcagaggaattgccgcaagtggcagttttcgacttggatgactttagttatgtttgatcttgaaatataaatgctataaaatatagtataacaatagtcagtcatgatcggttcagtttataaaatcgtctgtagtcaaagcgacatttgctacgttggtagcacgtttaatcaactcaagcatcgtatgattggacatcggtctcagtttaagcgttgggatgacgggaaaccatccggtgaaattgcaatttatccatacttccgaaagtatggtccgtatgagtttaagattatgttgatcaagcagtatgaggttgctgatagaaatcagctgcgcgcctacgaaacgttatggatcaacaaattcaagaaaacttgtgtgaataaggtacctccatttggactgctgaaaaagcaaaagcaaaaagtaaatacaaagaaatactgggaagccaacaaagaagtgcttaatgagagaaacaagacatacaatgaactcaacaaggagagacttgtcgcgaagattacctgtgaatgcggtggtcattaccaatatagaggcagaacatatcacttcaaatctcaaaagcatattagatggatggaagctcaatcaacccagtaggtttggcattaactcaatcgttttttttgcctttgcgcatatgactaatcatcatcatcaaacaaatcagtccgacgagtgtatttgataatcgtttctttgagaccattaaccgatagatcatagcctctttgacgaactttatggacttgtttcttgtagttaggccctagggctttagatatcgtctttgcgaatcgatctcgcgtgtataacgatgcatccttggcctcttcaatcatccatttagtgaattttgatagcatgtcatcaatcgatacaaattctgacgtatcaggcgttttgttatgctggctttcctggaaaatgctgttgctggtcccattggccacacattcgataaaccattgtacaggcttctcaatagccgacttctgcatatcagacttttctttggtcattggcgcgtcgttctgaggatggaatccatttaagtccatattcataagataatgatacaaatgaataccactatcagtattatcaaactcgtcaatcatcgccttgaagtatgctttatcgccgagacgatcacttctacacagcaaatagagaaatcgacgcatttgttttgacgctttcacgctgtacgaattgttggatgcaataaagagattattacagtccttgactcgataagggtcgatgccttttttctcaatcatacaagtcggctcggtgatgcagtctttaagttcgtcttggtcttcatgtgaggattgcttgacattggctgcttcgttcaaaacggtcaatatcttatgctcgcgtgccgagttgaagcgaccagtcagaattttcatctttggcgtctcaagacagtagcgagtcccaatgacatgatttttcagaatctcaaacgcaatattcttaccgcaaccttcctccccctcaagaacgacacaagctcctgacttttcatacggacgttgaacataccaagcaaataacttcatgatgtgattagtcaaatcatcacgacctccacaccaaatgtgtttgatatgatcttcaaagagtttaaactttgattgatcgacaataaagttaggatcgtaggtatgaacgaatccgttgaatttgttaaatacttcattggagttccagttgaactgattcaacttagtatcgcaagcacctgtcttcgcgttgtacggcataaaatcaactttaccaaacgtgatatcatctctataatggtgaatcacgtcagacagcggcaaagtaatgatgctatcggtgtcaaattctgtgttatcagtctcaataagtccattatcatctaattcgatcgcattgttgatattgaacatcatatcgaattgattgatacgggggataactgtgtaatcgatgtctccgaaagcatctcgattcttagtcaagtagtatccgttccccccttgcaaaatgtaagcaatgttgtttttgataaacttgtagagtctttccattgtgatggcttctttcttcagactaataacatcaagatacgtttctgtgttcttacaatcgaagattggcggcaattctcccttttcgtagtagatattaaacttaggataataaggaacagtcaagtcatcttgttttgttttgtcttcgtctttgcctttcttttctttgagttcctttggctcatactctgatttccattgcttgtatccttctggatcagttccaccagcaatggatttgatttgagactcagatagcttcggatgatatttggatgtttcccaatcattgaatacttttaacgcagcagcttgatcaaatcgattggtcatggaatgcaaaatacacagatatgtcttccgcatcaatccaagttcgacatgttgcttgcgatatagcataccagccaagttccaagtattgttattatcactgaaccacgatcgcttcatcatacaacaaagtttgtagaggcgggaatcatagagtccatattgcacgcaatactcggcgacattaacttcatcaagcatgattggaatgttcgtcatcatttgttggctcttgcaataataatgaaccaatgtcttactgccttgctggatataaaagcaatagcgatatccatctaaaaatgcccttctgtctgtcttttctgaatcagcgatatccaggcctttactattgaagtattcgtcgaaagcaccaatgattgccgtggcatctagcgaattttccttcacatcatactgaatgaaacgttctgtttcaatataattctcaaagaagaactcatcctcatcaatcgaattatttaattccaaatccgaactttgatcctctttatataccaccccttccgcgatcaccggttcgacaatcgactgatccaattctggaactttacatacttcgacattcgagacctcgacgggcttgattaccgatggcgctggtgtatcaacaacttcggcaatgactggagtattgacttgtggcgacatttcttctactatactgatctcaagattattttgttcaactgcaataatctgatgtttcccgcatcgatctttgttgcgagcaagcttgcactgttctccgttggctttgatgaagttgcacatcgttgttgctatattactttgttatattactaaggttatgttttttatattctatatattcttcgcttaagatcataatttttttatgatgtcgcagtattacaatctatgaacccatcactttagcggaagtgtgtccaggtgtgtatttttttgtatccttggttgaaaacagggggtgttgcatcgtctggttgcgctgagatgtcgagcattaagttgctgtccaggtgagtggccacgtgtgtccagctttggtggccagctttcttttgatcagaagcgactatatcagttctagatcaatgtatgttattagtgtccaggtgtccagcttttttctgtattcttatagaaaatattataaagaaaggggggtaggagggggtagtaaaaaatagtgtaaaagtaaaaatggaatttttttggagctggacatggacacttggccgtcatttatctgaattcataacaactgatgtgttccataactgatatcgtcgcttctgataacgagaatcgaggtggccaccatttgaacctccgtattttcgctcattcaggatcacaatgtgttcttgccttttttttaaatggtgcaatcacagattattattctgactcggcagttgctgcgcaagagattagattgctggacgtctattgacgcattgcacagaccaatggagagtacaaatccaccaacagagttgcaggaaaccctaccgggagcgccatccctggtggaataccaaggattcgacgtccgtccaactggatcacggttcttggagcgacgattgggagtggagccagctgcacgagtggattgacgcgagcatcatacaacttgtattccgcattcgtaaagtcgggctcgaatttcacacacagcacgtactcaactcctggcatcacagcccatatcgccatcgccttgtggtcgagctctcctggtgccatgccccactgctgagaaactccaatgtcaaccttgatcgtccgaaagtctgcaaaaattggaatgtttggcggaagcacggagtgcggtgtgtcttcgtgtggcccataactgagatctggacaccatcgtcgcccttgagaattcttggcggccatgtggcctttcagccatctcttgacatgccgcttacgaaattgatcgtttagctcctcaacgtaatcttcgtggggagcgtcggcaaactcgatgatgtgaatctcttccgtgtcaggaaaccactcaagataattgagtcgaacgattggatcctcgctgtcagcaaacgcgttccactcgtcttccgttgcgtggcacacacgcaatgtcccggtcggcggtggaggctgtgtcagtgcagcttccagagcagcgttgatgcgatcgatgctggagagcagaggagtcattgacgccggtgtgactgcgtctgtcgcagcgacagctttatttggcgcgcggcggtggttccgcgtagctactgcaggtgacgagtatgagtccccgtccccaaagaaagcaacgctcatgtttcttttgtcgtcttgtcccagaatgagcatcgagaatgttcgtcttgtccgctcgtcgtccgctcaacatccgcccaaccatcccatataagagcaacaagagtacccctagacaccctcagagacagcgatgatgtactatatagtacagtaccagtgcagccatctgcagacatcttatcgtggtaggatgaacacatgaaaatgctgatgccagccacacaggatcgagatacgaggttcatagttcaaatatcaaccaaggaccgaccaagttttactagcttacgccactttgaccacgaagaagccacgtcgccatatctatccgagaaaatgggctcgaagctccggcaactgactcctgtgatgcatctgcccgccgttgtatccgctcgacaggaggcacttcaagggctcaagaaaatcagcgcaatccaagtttcgcacgcggccgagaaggaccgatatgtggtcgacgtgtgtgccgaggaccggccaaattccacttcgaccccccaagatggcgataagcctcgagcacgaagccgtcgagttgagaaggacttgtcggagtttgtcgacctgcacgacaaagtgtacgacattgtgcactttgctcaccgtcgtgaccaaagcgaactgtgcagcaaaatcctcgacgtgatcgtgtttggaccgaatccagacagcctggtcctacactttgtgagccgtaagcgggtcgcgcgtgaacttggacgcttcttggaagccttgcgtaaggttaccgtcgagcacactacgactggtagtcaaggcggctgctctgggcaaaccctcgtggttcaagtagtccacggattcctgctttaatcgtagccaacgcaatgatgcttgtagccaaggacaatgtaattaccgtatcacaagtactccatccaaatatgctgagctcctaacgttcttgtcggcgttgcatcttcacagtgcacaactgagcggcatgaaatcgcgcagcatctcaagcacaagctcaggggtcgtttcagggttggcacaagctgccaaaaccgctgacacaacctcgtgtaggttttccgctgggcttttctgcagtcgacggagcatcgcaagcactttttcggcggtcactgcttgagactcgatgcgagcggagagaagtttgtcccggatccacagcaatttgtctgtcaaggcaaacttcgttttgtggagctcgtccatcaacctgcccaattgcaccaggtcatggtgacaaccgtatgtttcggtaaattcgactttcgggacgtctgcatgttcacgagcgtccagctcgaatacaacgggttgcccaccatgttttcccaacaaatccgtccgtggcagtagccactcccgtgccactgcgccaacaagaatattgcggagccatgtatgcacctgtgctgtgtcctcttggagtcgataaaaccccaccgaagccttagttgaaacccattggcttggcagatctgctccgtgaaaccaaagaatttgtcgttgctgcctcgggacgggtgtctcgttgcgtctccacgctcataagcttctctactcatgataaggacgtcgatcagcgacgacaagtcatcgcagcgaagttccagcccgttcttggcgaaaatcacgtccgcaatttgctcgtcttgaatgcggacgcggaacgacagccgccgttgaaaaaccttagacagcgttccatcgggaggaggctgtgtcgatatcagccccgagtacctccacagctccctcagaccaatgttttcttgtggacgagctgttggcacttcagtcttgacccaactcccagtggctccagtgctaccagaacgtgtcgtggcgcgaaattggatcgaaggaccgcacagtcgcggaatcctgcatttcctccacagcgccgcagtcgattgcctctcgcagaaaataatcccagccaacatggaacttatcccgcgagagatacacgtcacgcacccagtaaagcgtcaactggttcagaggtgcatccactcgtgaagtagagcgatactttgccgtagttaacccacgttggtatcgagaccagcctccactgagaatctggtcactttgcgccccaatataacgcacgacagcttcattgttcttggcgttttgcagagtgagcccattgtatcgattggctctttaagccctgtcgcaacttctgaaagttcttcgtatcggcgtcgtcattatagaccatattctacttactggtggtggtggtgggggggtacatgtcatttgctgcattgatacgaggagttttgcagccacacccgatattgctgctattgattgaaagaacgagcatcttcgaatacgaggcacattactaaactcactacatatattgacattgttcgggtagttattgctagatcgcagtgctacgctggtgccggtagttaacattggtgctcaacgtgatcagccacgcatgtaggcaaggccaattggccacgtgagcaacatggaaatccctatcacgagcgtgcccacccactgcaacatcgatgacgagctcgaattcgagtcttgttccgtgctgtcgtgctcctcctcaactgctttctcgtacttgagaccattcgcagtcactgcccggaagtcttcggtctgctcgacgataagtcctggagctcggtctctcaccttcacaggctcggtgtatcggcgcgggaactccctgcctgctcggtggcgagatgactccatcagcacttgccgaataccgtcgccctcaacagtatctcgcaactggatgtcgtccatgtcgtacagacccacaagcagttccgggtgtctttctccgagttttgattcattgtgttggtcttgcgacttgctgcgaaagacacgatcgcttcggtcggagttcgccatcccgaagctaaagccttgctgcatctggccaccaggacgacctttatcccttccagtcagatgcccacgctgcaacgggggacagtcagctcctctcgagcttgttctctacgagaaggtcgcgagttgtcaactgtgaaagatggtttggctcgctcagaaagaagccaaggactgggacgcggcggcgggcagcttcttacaatcactctaaccgtttttggctcatcgatgcctacggacgacttctatcaagtgcactacatgccaccttcctccatatccgcatttgcctagctcagctcagctcaacgtccaccctcctccctcctcgctactctcctgcttcgaacaatggcgaagttaagcatcttttcgattctgctagtatgcgtgctcgcggttgctgctgcccaagacgcgaccaacaccgggggacaagccggcagcgtgacttcagaccccgctgcctccaccacctctccgcctactgctactgccccgccaagcaccacgaacgccccaccggcggctggtgctgctcctgttaaccccgcttcccctgcggtcgccccggcaccggcagcgggtccgacttgggccggtaaccccgctccgatgaccgacgtcagcggcagtggcagtggcagctttggcagcggcagcggcagcgacatcgagacccccgtgaccaggaagccccggaagacgtcggactcgtcgcggtcccagtcgagcgagccgaacccgtccgaggactcgggcgcccgaacgctcgcgacgactaacgcgctgggcgtggcggtgctgatgggactcgcgtttgcgatgctctgatgaggaagatacgcacgcatgatcgccacgacaagacaagacacaagcggagctcgcgtggttgcattttgatggattttcctcatgttcctaggcagttccgagcttgaagacggtcggttgtagggctgcagttcatgtaatcgctaatctcgacgcacgatttccgtgtttgatcgtctttggagctggctactttttgtgttttttgttcccgatcgatatcagaagatccgaattgcaaatgcagacaagatggccaaagatttctcggaacgtggtgactaagttggcctcttactcggtgcacatgtactaaaaacccggaggttggatgataatcatgaggcctacgacgacggtgtgcttgaattgatacagtagggcattcattgcgttaaagcggatgattttgtgtgttttgaacgcacggatacgctttggccaggctggccgcttgcactacgcatgcaccgtgcagagactgcggcaggaacgcgcttgcactgacgtgccgccacgagtgactcagttcggcacgcctttcaaagctccggcagcaagggcagcacttggacctgatgaaaagctgtcacaagttgagagagaccttgagcttgtccagtcgagcactgtgctgtatcctacagcacagtgtgccccgccacgagaaattagccatgcgttgcgatgcgccaagcatcgtctgtcgaggcccgtgcccacgtgccgcatggagctgtggatggacgccgccagccggtgggcaacacgccgcacacacgcttaaaacctccgcacgatttgtgcgcagcatacctagcatatagggcgcctcgacaacaggacgcccaggctcgctctctgaaccaggggcgcggccattctggtgccatgccatgcggtgctgtaatataggagcttcatgaggtcccaactgatactgcagggctcgaaagtgtcgccaatgggtgggtgggtgtccacaataatgctgtccttctcgaggcgttcgacaccgagagccgctatcccggcaccgcaccgcactgcttgacggtacggtacgtcaacgtgagatcaaatacatgtaaaacaggtccaacttgaagctgaccatcactcttgcacacttggtctcagtatgtatgcgttgtcgcggccagctggagtctcgacgccacaaccatcatggcgacaatggatgcgggaacgctcgatcttctgctgtctcgtaccttccttgaaggccgtgccgtcgcaacgctctaggcgcgccatgcggtcgaggcgccaccttgcacctgggctccgcttcagctccagctcgaactcggccggctaacgttctctcattctcacttttacccagcaactgccgagcagcttactactccccccaccactccaccaagtattatcatgaaggtcttcggcttcctcgctgctgctcttgtcatcgccgtcgctgccgcccaggacgccaccaccacggcttcggctgccgcctcgacggccgcctctgctgctgccacctcgacggccgcctcgactgctacgtcggctgccacggacgctgctgccaccacgaccggctcggccgctgccggctccgccgccgtgggctccaccaccgtcggcacgacctcgggctcctcggacgctgctgccaccactacgtcgggctctagcgctacccccgcttcgtcgggctcgtcggacgctacgacctcgggctccacggactcgtcggctgcttcggcctccgcttcgggctcgtcgggcgccgcctcggttgctgccggcagcgttgccgctgtcaccgccgctgttgtgacctacttcctgtagacgcctggagtcggttcgctgctagttgcgcagtacagtaccacaacgaaacgtgttcgtcgctgatagagtcaatggcgaagtagcggcgacacgtagcacccctgcatgtcgaggagcgccgagcgctctctccagtaacgataaaagtacaaatacttgagaaatcatacaacgtacagtactaccagtgtacctttccgttcgtatgaagtggcatcagccagcagagaaacccagggtataaggaggctacctgcatcactgccaggacctatcctgtaggttatcaggatacaggcgagcctggatgtgactcggtttgtcatcaacaagctgcagatccgctggacgccaaggtacaccgagcgtctccagactgtggaacgaccgtttacacaggataggttcggtgtgattgttggcactctgttcatagaggcatagtctagactctgcttcctaatggcacttccgtgttagatgcgttaaagagtgtattgcaaccagcctttgattgtctacgatgtagctgttatcggagatagtccttttaaatggctaaaacctttaaattcacactgtacaaaaaagtgcgaatctcaagatacgttgtctagtaacaaaatggctcaccatgtttttatctagggattgaggaaacatacccgctaacgtatcaatccaattcctctaagttttcaagaggtggcgaccccgacgataaacaaatgcaggcatactgaagaaaagttttgcaaggcaaaaactttgtcaagatcaagcccaacaatgaaagtggtgttaagaaaatccaaagtagtttcacgattgattcggcttgcaaagtttggtccattatttcatggataacatatttgcattgtattattacacatcacaaaaccattgttttagagaagaaaaactatttctcgcggttcgaacgtgaatttgctgtttaaaagaaaatatgtgagatgttaatacaaattgtcaggttaaagttccaggttcacttagtcctagtcgacagttagaatccgatagatggtttaattgtaagccactttaagggcattgaccccttctcatcaagggtcactccaggttttacgcagtgaagcgtttctaaagagaagattgttaaaccctaaccgtttatgtctcaggttaagagaggtaagtaaatagaggtaagaaataaaataaagaggagtgataaatgattataagtggggcttcgtccccagtaaatgaaagcaaactaatattcattatcgattacggatgagtcattctgatctatcaagtcgatcaaattaatgttgcacttcaccactgctgctctctctcacgctgaaatatgtacttatactgcattgtagtggtagtacacttactactaccgtatcaaacagaaataatggttaacagtgaaattgcatttcgaggcctctgggaattctttaattttaacaacgtgattttagccaatcaaaacgcgtatagctgctgaggcataacacgaagaaatcatttttgaaaataaaatgaggctatttaatggcaatttaagtgccgaacgaaaacacgtcaatcattcttctactagtctggcatcatcccggttaacgggttgctttggaggcgacacgaaccccatttagtgaaatgggatacggacgtcccccacccctcctgccgaagtggactgaatactccactgcgtctatataaatggggtgatatttatcacctgttactttagcactcttcggcggttgtgtctctccagcccctgtccacctgtcgttaaccctgctcggctgtcgtctgttaataacctttgtcaaagaatatattatgatattgcgaggggtacatcgggttccatttatgcacattatggaacgtgatgtgacgtacatacgaacgccaacttcaacgagttgcagtgttacatgttgaagtgcagcttgttaattaaatatatacgctaatacaactattcccataactaaaataattctcctgttctagcattgatatgtgctacatgtcttaagcttatcaagtaaaagtatacctatctcaaatttgtgtgagctacgaccctgtttgcctgatgcagcgcctttgacgcaacgctgtggttaatatctactcacacgagcacaatacatctagttatcttgagagtaaacagcaaatatacatgctaggttatttggatagcaggtccctagttcgcaacacccgaagcgctcgctacgtctagcctctaatcagtcaatctgttgagcaaaatgcaaactgtacaccaggtagatgtacgcagatgggagccctctagctcgtgacgctgatttgaagactgtgggcgcggttcaccgctcgcgcaagttgctcagctccgtagtctagaaggcgtccatccccgaatctcactgaccacttgtacataccgtcagagagccgaagggctactacttctccgatgaatgtggtctcctccgagttctcgttcaatgcaagctcatccatgacacgccactacaggggctggccaggctgtcgaaggaagagccggattagccggtctacatcacagaaaccgtcttgatctgtttcgcgggccaaagcgggacgacgagttcgagggcgccaggtgttctctttactggtacacttgccatagcggcctgcacattcagtaggcccaggatcgacaaagtagctagggcatgagaacagacccatcctgaacgcacgaacgcttcacacatgcagtgtagaagtccccgtacgctttggatgcgttcagtcgaccaaatcggcactagctcaaaggccttagggagtgtttgtgacttcaccaacactctgtgcaaagacagcagctcggcttccacttcgttggccttgatgccggggggcaatctcccgtttagagagtgtaggaatttctctgcgcgttcgtcgtcaacttcagctcccagcagtccacgaccccccataatgaacttcgacgtgttaaacacaatcgctactaagcggtgactgcggcctcagcctttgaagacttgcttgtagttgctctctgtcgccactagtcgcatagcctttgcaatcatctcagggggaatcaggccttcgcaaaagtgggcggcactatcaggacaaagagattccccgtcggacctcagaatgcgtggaagaattccctgcaaaacaccgcttgtagatgcccttgagctaggtacacacgttttctttatcacactatgatgggactcgatgccctgctggctcggtgtgatcccaccaacaccggcaccgttgatgtgccaacggttccatctctcagtcaaatacacgtccttgaaccactctgcgtacgtgcgttcaccgtgagcgatccagttttccgtgatgacagtagccatcttaacaaaccgccggtgcgttcgagccgaccgcagcaggtcaacaccaggccgaatgatctcgtcataggtcgcctcgttgacgaagagcgatcgtttcttgcgtacctgccgggggtcacgtcaggccaaacttgctgaaacacagatgcaatagcttccgaatggtcgagactgccaaaggcaggtctcactaccacacccaggaacgcctgagcccgttctgaaatcacctgaaacatgcgttcgtacgaagcaatagactcgcttctgacgaatatgtacgcccagggaatgaagcggtgaacactcgtcccgcgcgcccaagtcacagctgtagagctacagtccacaacagtccacccgccaaaatggagtttgtacgtgccgtcagttgcacacacgagctcttcaccttggtctctcacagccttcgtcacgtttaaaaacatgcgcctggaagtgacgatcacaccgaatgatatcccctccccttcggcttgaccctcaaaagtgaaggtatcaagcaccagcatgtcatccatccgtctgtcggccgcgtccgtcacagattcgaactgcgcacgagtcgagcagactcgagtactagcccaagcagtgaaggaagcatgactcgtcacatcccacccgtccggagattgtcgaacgaggaaagctttgcggttctctagttgttttcttgtaggcacgatgcgcatcatccgaggttgatcgcgaaaacggtgatttaacatgaatcgcaggtgcatttcgccccaacccatattgagaagagcgtccacttcttcctgtggataccacgacggcgggccccggttgcgatctgtccatgctcgccggactgctcgagatgaaaggtggctggcaccgtgtcaccgagggtcgatttgattcggaaccgatgtgtacatccgtcatgggactggcacaagtacacacgcgcaagaagtcggactgtccggtagcgagtttcttacgcgtgaacattgtcgtcctcgtccaccatagctactattgcgtctgtgaaggattcaaatacaccaacgacggtgaacactcggcgcgtggcaacgtctgctccttccatcagaacatcctcttggtcgtcgaaatcaaaggaagattctgagtcagagtcactgttgtctgagccactggatccagcccatgccagcccgtcttggacatccaagcctcgccgcagcgtcgggctcctgatgagggcgtcgctgtccgcggaaccaccgctgtcgtcgaccatctcgtggtctagatgtgtcgtaaccatcccaaccgattgaaggagaaaagaaaaatgaggaaactgcgtagcctgaagtgcgcgatgtcgtgcccgacaaggtactaaggcccaatgcgactctcagcacgttttaggagcgatgagctgcaaatagtcaaatccttcaacggcgcaccatcgtcgagccttacccacgataagagtgtaagaagtgcctacagatagcaacaggagtttgaatgcttgctcacagatatgtgctctcacttccaaccttggagataatcttagatacaacagtctggaatgaatgcgcgactcgaggtttcgctccgccaggtactcaactaatagccgagagcgttgaacaagaacctgatcgtggttcgttcgtacgcgactcgaagtttacctccgtgaggtactctactaataaccgagagcctgatcgtggttcgttcggatgcgcaaggacagtgggttagtccagagattacagtatcgtggcggcgctgtattcttgggctgcagctctctaaattacttccggttgcttgtagctgactttatttggtgtatcttgtacgctctcagtcccagctatcggcgtgatattcgaatgcaccagattgaagaccctcaagcgttagtacgagatgtttgccctgccgattgcgtattcgcactcgccactaacctgatgactgctaggtgtttgccttgcagttaaagagcactcgcaacaggttttcagatcaacaggttctcaaacttgaaaacctgttgaaaactaacagtcgaacagggtcgctaacaggtaagtaggggctgtgagctagcaacaacctagtagtggtagaacaacaggaattaattattttccatataaatgtcatttctcgctaacttagtatatagtgttgctgtgatgtttttccccctcttgctactgctctttggtgcgtcgattatcacgacactccttacacagacatcttgtccgtgttttttgctggaacactccgcagctaaacaacctcggtcccttggtgctcttggtgtaaaatgtagcattttgctttacggctgacttggtttctcgctttccacttgtgtcagctctccaaaacaagcttttatctcttgcccgggtccatgttcttctccttcctacgtaatgaactcaattactatcgggctatcgaatctatggccaatactccaacttgaggaagagagatttccatatctgaatgcatatccacacactcagatgcaccaaggtatactgtcgcacgttaaagtgagtggagtcacaacctgaccttaacccaccggcgaccgttatcccgattttgctgggataagaaaaacctcgggggaaagtgccggttcaagccatacaggtggttagggtaactgcgactcttcaaagtcccgccgagagcgttttgccaatgcgatctgtttgcggatttctcaccttgaaaggtagatgggcatgggtgccgggcttccacgccaccattggccaccgtacaagcatttacacccgcagattgccaggtgcccgcgaaggattagcgcttctccgctatggtaaaattctgagttgataggatgcaccgctcactaatgttaactttcttttcccttgtatcattgccttctatagatgccttcacacgcgcgaggtacgctggtcgaggagctacgagtacggctctgccggtgccactgcgaaggccgagttgtttcgatcgagacctggacgctactgttcgtggaggagcccgaccgctacttcggcaatgtacgtgaggcgtcagggctactggagctttagcagaagggaggctgacgctgagagatgttgtggactcggtaggtgtgcgagctggacaccatcttcaacccccacaaggtaaggcggcgtcttggcagctttggcgttcatatctaggggcccatgctggtggtgttgttgtcgacaggcgtattacattcaggacgaactgttcactggctactcccggcagtatagcaaggaggcgatcttgcgcatctgcgcccacctaagctacgtgcccccaccgctgaaaccatgcgggtgctgacacttcaccctaacgcgagtcgactccacagcgaatgtccaagcgcgatgccgaaggcatgacggtggaaacaagcggcagggaggacgccaagagcacgacagggacagcggggtgtggcaagactccaagaacgacagatacaacggcggcttgaagcatgcagtcttcatggtcagctggggtctggttacggagcccacgatgccgtacgtcgactcgagtaagctcgtccgctacgaacacttcatcttgtattgggttctctagacctcgtatgacagctcatggggcgacagtggcttcattacgctgtcaaactcaactgcaggtcaaagttgatcagagttgtgattgattttcatgcaattaatacatagttgttggtttgaccctcggcggcaatgttagagtagtgatcgtagttactgcatcgaccatcttggttcagctgcgtacaggtgtaaaccccgaagggtgctgctgtaagtcatcggaacctgaattgttttcagtaacttccaccgcttgcaaaacgaagttcggcacgtattacgatgccgcggacaccctcgtgttgtcagcgccaccagacgtagatgagttagcttcatgcacaaagcacgcattgccaaaaaccacatcatcttcgaacacagtgtcgtggcaaaatataagggtggcggagctgataagggagctgggttgagccaacttcgagtctggatcagcactgataactgtatcgctgacttcagcaatattgcggatgtctgcggtgacgacgttgatcttgagcaagtgtggaaagcgcgatgccctagacgcaatcagctccatacctctagcgaccaggtcacgttcgatctcaataacaaccacacgaaatgcttgcgtttgcagagcgatttgagcgagaacatttcccacgccggatccggcatccagaaacacgtcattcacttgaatattcgcttcttcgatcagcatggacaccccagccattgtaatcttcgcggaattttgctgacgttcactcgcgcgcacatcacgcctggtgagtaggcagaatagtccttcagtggcgttgtaggtttcttgcggtgataggatcgaaatggtatgtggtgaaggcgaaaaccgtagaggagacgcggctttggcttccaaatgcagtcctgctcggtctggtggcgggcggaaatagcgcggggggaaactcagcacgttattgccatatcgtctcttgagcgtcttgattcactgttgcagtttggttgcgctccatgttgacggcctcatgtctttctccactgacacccagtcgattcgtcttcccgcttgctcgtacaccgccgcgagctgaacgagttggcgatcctcttcatctgaaaagtcggccatttttcgcttcggatactgtctatacaaactcaagtaaaacaacccttttgggggctcatactgaaaccgagtttattttttttggatttgtaagtcaacgttgggtcgctgtcgaccgagtcaatgtagactcgttcagagtcgacgttgacttcgctattactgaaactagtacgtttgagtcaatgtcgacttgggttaagtccatattgacttcgcgatcaataaaacaagcgtattcgagtcaaagttgactcgctcgaagtcatcggtggcttggaaatgtgtattcattcatcgttacgcagcagcacacacaactacagcaggatggcactctcaaacgcagccaatgcttccataatcttcgcgcatacacacgcgtatctgccgtggtccatcgagtgaatgacggtacctgtcttgtcgtggaccaactcatttcttttctcccagaactcgaccgcaagcgccttgaactcttcagcgtccgccgtcttcgatccaaacgcctccttcattttgcccagaatgaagtcgcgcttcttctgcattgtgctcgtgttacctacagtttttttccaatccacagacaatggaagtcaatacaatgtcaaaccacactgaagcagaaactcaagcggcttaccatttcggatctcggcgttccattccgtgaactcttcgatagcttcctcggtcaccgcgctatacttgtacgtatgcagctgcagctctcgtctcgcgatggtttcttgcaatccgctgttctccgttttcaccgcctctagcgcagccttcatcgattccgactgcgttctcactccatcccgttctgcttgcatcgccgtcctctcttcctcaatccggttgcggttggtttcgagctctttaaacgcagctgggcacccgttgttcttgaactgctcttccaggagccgggtctggcgcttcatttcattcaaaatcttcgcctgcctcagcgatattcggcctccttgttgcttctctcgtctcggcttctctcgtttcttttatccgcgtccaactgctcccactcccgttgcaggagatgcgttacgttctggagacgccggccctcctctttgagcttggcctcatgagattgcagctcctctgctttgacttgtagttcttcctccttgttctccatattcttctctcgcgtagccacctcgttctcccggtcctccagttttttcttgcgctcgtcgacctctctcgtgaggttgttcatgtcttcgtgcacatcctggagtttcttagcatggctagcctgcgccttaagtagattgtctgcgtgcgtggtgacggattgcttcgacaaattcaactcagtttccacatgggcaagtttgttgcgcaagccacttgaaatcgccttctcctcggctagttgtaaaatcgaattccgcaacttcttcgtcaacgcgatagttatatcgttgtctgggagataaaaattcctgagttcggccagctcgttttcagcggctgctaacggctcctctaatttccttgagcgcgcttgctcctcctctagcttctctgaactgctgcagtgcttgcaaaatagagagttcaaattcgcatactcccctcgcaaagggtgggattgcaggctccgagctggggcaccttcctcctgcacggccatgggtgtctgcgagattggaggccctggagcttggtctgacgctagcgatgcttggtttctggctgcggtaagctgctgagccgcctggatgtcgcattgctcgatcgccaggtgctcagttccgccacgttgcgatagcttcgacgaacccgatccagcggtctgcgcgtgtgcgtctgctttcagggcttggtccgctaagtaaacctcgtagaactctttcagcagcgcaggctcgtgacgctggagctcttctgggttgtttttgaacgctttgaattgagtcaacttgctcaaagcctcctagcccaagtcgttgccgctgttcctagcagctgtgtatttatccgcccacacacgcttctggtagtctgccatcttgcagtaatcctgccttgcgccgtgggccttgccggtgctcgcccttttcgcctgcgatcttcttttgtagagccaagcacgtggaccggagcgcgtccttgggtaccaggggagtcgcctcttcatcgcgagtcgtcacctcatcctccgatgcactcgcggcgcccaactcgcgcgtcgtcccgttggatccttcgccagtcttcttggcagtcttcctctgcttacgggggcttggcgaagtgtctggcccctcccccttcttccgtttctgcttggcattgccggtggcaggcgtggtcttggcagcgtttgctgacttgtcagtgggcgcgctcgtccgctttgtcgctggcttgtccgtcgcctttgctgctttcttgctcctcgtcatgggcgcctggcgagcagcaccgccagccgttccctcgctctctgcagcctgagatcgcttcgtcatcagcatcgccatcagcactttgctgcagtcaaggttctttgagaaagtgaaaccgcaaatcctacagttgaaataaattgatgtggaccaattcgatttagaatcaagaggactgtcagtcaacgttgacttggtataagtcgttgttgagctggcttcagtaacaagtgtctaagccagcgtagacacgttccaagtcgtagtcgacttggtgactcaatgagagatgtacgagtagatgcacatggttgtctttacaaaacgatgcagaagtggtgagataagcgccgacacaagagtggatacgtcaaattagagatttactgaagctaccagtcacctcttcggccttgccggagcacgttagcgatcactcatcaactcttccagcgtgatgatgtaggcgcgcggcatattgacggtggtcagctcgttatcgatgtgcagctcatcgatggtatacacctcgttgtcggggcgcggctcctccggtgcgctgtgtctccagatgttgaagtactccacgaaagtgcgaccagggatagcgtggccaacacgattagctcgttccaagagctgtgttgcttccgctatgccaggggggcattcgaacgcagcaaccgcaagcttgtctgagggaatgtgcagatcctgatagcgctcaaaatcatctatccgaaggttgcagttgtcgacaataacgatatccacgccacgatcggggctgcgccacaggagttctctgcattgttcgtagcagcttcgatgcgcctccgaaagccgacttgcgtcgaacacataggatcctccgcgctggaagaagaggtcagctgagcaaatcgacgcgcggaaatcaaccgttgctgcataacgagcgacctcttgagcaaacgttgtcttgccactgcccgggaggcttctcatgatcacgaagagccgaggcgggtactgcatatacgcgcggcagtcctcccaatacgcccggtagtcgtcaacgattggtcgggctttgaactccatttctcacacgtcggatgtcgtcgaacctccaagattccgctgcttctgatgttgaccacaccatatcaccgaccatgtgtgaacacacataacataagtcaacattgacctgggatagtcaacatgggatagtcagcgctcacctatagaaaccgtgtgcacggattggttggtatttcatatctacgagtaccgcgttttgtgaggacaccacactggcctaggtagcgaggcgagcgacgttcaggcaccgtttgccatcatttctgttgcagaagaacttgcaaaaggaagttactatagaagtgcaaaagaaatgccctcgtactaggtagtcactaaatcaagaactactataattcggagtgcttatcgagggttgaagttgaagctaataagccaatcagcattggctcaatccaaggtcacacgaagtggtatcagcctggcttcagccatcaagcttcgcgcaacacacagcttttcgcgcgcttttccaacttgcgctttgagttcgcgcaacacgcagattttcgcccgtgggttcgctccggtatctacgccaatcagcgcccccatcgtttgaatttgcgacgtgtaattggccagccgtttcgcggccaatcgtgctcgcgctgcgatccgtgccagaagatcgtttccgcgcgctcagtcccaaacctcatttccgaaatcgccagctactgctccagcgcgcttccccaactatgccgtcgcccggctcgcatcgaccgtcgccgccaaggccgccaccgagctcgccatgctgctgatccttactctggccgccgcaatgcccgccgtgctgcgctcgctgtgccggccgccgccatgctcgtcatgctgctctcgctgtccccgctaccgctacgctcgccgtgatgctgtggccgggctcaccggaatgctgcccgacgttcgcactcgccgccgccgccatgctcgctgttcatctgacgcctacgccgccactatgcttgcagcagctatgctcgccgtgcagcagtcgcttctccgggtgccgctatgcttgccgtcaagttttctggtgagcttcgatgcctcgctgatctggagttccagcgcctcacggtgtcaatgttgacattcgccagcccagcgttgaatccctcttctttacatgcacgtgggtgggtgtgcggccgtcatgcccgtcgtttcgcttctcgcgagctcggtcgtgatgaccgttgccatgcagcgggttacgtgcacggtgagtgcgacgccgagcgtgtatttatcactgtgaaaacaatgttgaggagctctagaagccgtttaggacatctagcagtaccagtctatttgttattgcgaaaggaatctgctaagcaattcacctgcgatgtcaaattggcacttgcaactcaacatcgagatattacaagtatacgatatgctctgtcgtgcttcgtatccggatgtgtttagattcgaaatttaatatcagtatagttgtatgatcaagggcaacaatgccaacgtatccggatgcaagaagtgctccttttgccccccccccccctccaccgtcactcgtcgagatggcacagaagcgccgagtaggcagcgggcgcgacgcccagccgccccggaaggcgcgaagaaaagcagcgaggacagtgaactacgaggcatctggtaagcaaaacgcatgtttcactagcaaagcgtcgttgcgatcttatagtagactttcataatgccgcagacgacgagtttgaagtcgagaagatcatcgagatgaagttcgtgcgtggagagcccaagtaccatgtgacgtggaagggttacgacgaggcgtcgtgggagccggaatcgaatctgcattgtcctgagctcctcaacaagtttttaaggtagcacaacttcaagaggcacgcgcgttgaagaaaaaagcaacccgaaaagcggacttgcctgaccgaggtctcggtagccacgtgacggctaaaatccctgcaaaacaccaagagggttctgaaggtaacaagcagcacgtgtttgtcacatgctcttatgttggttttggggaaaatgtactaactgtaataatggtgcccaggttcggaggaagcgtacgaagtggaaataattcttcgtgaaacttttcgtttaggcttgtcttactttgaggtgaaatggaaggatattcccaaacgagctaggagcctgcctccaatctgaactgccctgacaaattggagaagtttaggcgtcgccagaaagcagcacgtcaagctatgctcgaaaacccagctccagctgaagtcaccgatgctaccgggacggtaggccatgacagccctcggaaagataccgatgagaacgagaaacccagcggtggatctacagctcgccaagcaagcatagcatcgattccagaaaatattggattgggagtaaccaatgatgctgacaatgtggctaccgagagccggcaaaccgatgatcgaaccgaaaatgactacgagtacgattacccggattactttcccgagactactgaagaagaggcgatctcaaatgcaggtggtggtgttgagcctcggggtgacgggatctcaaaaaatgcggatgcggatgctacgccagtaccgcgagcagattccagagggtcaggaaaggctcccagaaaaagaaaatcgccccggcagacagcagaaacaaccgcaacaccctcgcaaaatcgacgtactctttcgtctcccgggagtcgagtatctgggaagaaatcgaaaagacgtgcggagatgcttgctgatgaagtgaacgtgggtattgatgacgatcacgaggtgctggaatcggatggctgttctggcgagagtgccgacgacgattctgaagatgagtttgcaaatgagctttatattgcgggtgataccagaaacgaaagttttagtgtcgaaacagcagaggaaattcgcgcggttgccggccccccaggactacataacagatgaaatgcttcgaggcatgtctggcaatgggtgggagttgctaccggtaaccgacgaacgggatgactcggacctgtccggcgctacggatgtgtttatggatcctcctcaccttactgtctcggctatagaggcagcgaaaacgatgaaaccttctgatcttttttttactacatgccgaagactcgctggacggagattgccgaggaaactaatcgttacgagcgtcagacacgaccggaaagacttcgacaggcgaagttgtccattgaaaagaagacggacgacatccacaaacgcaaggaaatgtttcaaggaaagaaaaaggagctggacgcgttctaagacgtacttgccgcggagatcatgcattttctggccctagtaatatccagggctatttgcccgataaagtctcgactgcacgatcattggaagacgcgagcccgtggagcgatcccagctggaacttggtcgccatttatggttcgcaagcgtttcaaggagattaacaggtactgtaacttccacgttattttaataaagggtgcaataacacgtccttcgccagatttctccactttacgaacaaccaggctccgcaggctaagacggaccgggcatggaagattcgcaacgtgataaacaagttacagactactttcaagggtggaatggaactagggcgctgggttgcattcgacgagatggttatcccttcaagaagttcgcggaacaaaatacgagttttcctgaagaataagccgcacaagtacggcaccaagctgttcgctgcgtgttgcgggaaaacccactactgctccaggtatgctcatttgcgctattttatatagtcggtatctgaacgctgtggattcatgctcaggttcgaggtctattgcggtaagaaacaaaacagtcaatttgttgacaccagaagtggaccagtttcgaaaccttaaagccttgtgggaacagcgtcgggtggatcgatccaagaagcgaatcatcatcactgatcgcgagtattcttcggtgacgttggggtttcgtttgatggacatggggtactacaatatcgggacggtttctacgacgcgtcttggcttccccgaagacgtgaagaccgacaaaaaatcagcttcgagagggatgccgcgcggctcatacattcttgctcggaacaatatgaatcgtcaaatgtactcgacgcggtgggtcgactcataaatttgctactttgtggcgactggggcctccgctagacgtgcgattgtgcggaggaagcaaaaggacggctcacagggaaacattccgtgtccggagtttgtggtactgtacaacaagtacatgggggggttgacagtcacgacctgttacgtctgcaaaggtgcgtgttgctctgttgcggttctcacttacgccgaaaatgcttttgactaggtactccatccaacgagtcatgcgaccgaagaaatactacaaaactgttttctacgggcttctcgacatagctgttattaacgcttttatcacccactgtgagtacgcgaagtcggtgggggaaaaccctctttcacacgcggattttctcattcagctacacgaggagctactcgctctcgaagatgatgacttcctggaaacggtgccagtcgccgaagccgctgttaccgaggtggagccaagatctaaccagacaccagtttcgacggcaagctcgaagcatcaattgatggtgccgacggacaagacagcaaagggaaagttcaagtttcgcgtgtgcaaagtttgctcggtactgcgtggtgctggcagtcctggatcgaatcgacctcccggcacaacgcgtcattactgcaagcagtgctccactgatcgaggaagactatttttgtgttccaaggcgcgacacgtatcctatggtaattctgtatcgtgcttaaacatttggcactagaaatggaagaacggagatcaacttccgcactctgaaaaagtcggacggatccgaatgtgtcggtcgaaagaggagttacgcgcggaaacgatggacacagcttcctcggatgctatactgccaagacaatacgagaccgatgttcagaatgccgatggggctgcttcggtgtcatctttgcagttaccggctccaagtgtcacgcgaaacgtagaggtacaagtgcatcagccagagcggccaggcgcagatgcagcaggacaggatgaagaaggattaactgcgactgagaggcccccggatgagagcgagcgggaggccgtggcggaagtgctggtagagctgctcggcgcggtggaatgtacgctcagcggggccgagcagcagaatgagtcggataattaggtgggagtcaatatttcactgcgaagtcgatcttgacaaaatacgcctgtaagagagagcgaagccaaccttgacccaagctggttgtcaacgttgagatctatgtttcgctgcgaagtaaatcatgacatctgccatacaaacttaaatacaaatacgcctgtgagggacagcgaagccagctttgacccaagctggttgtcaacgttgagatctatgtttcactgcgaagtaaatcatgacatctgccatacaaacttaaatacaaatacgcctgtgagggagagcgaagccagctttgacccaagctggttgtcaacgttgagatctatgctacaatacgaaagcgatgacggaatatatgtaggcctgggcttcttcattacatttcagcatcgcaatcagaatatgtatgcttctgtgaagctgggctaagcactttccgacgtactagcgtcacaacgatactccaatgtggagtagcgccctcgcagaaatctcatgaatgcgatctcgcacaaactcggcgcgtctggatagcggtcgcgccgagcaaattattcccggttgttgaagtagcgtatcttcgaaatacaggcccaagttttcgcaggcttcggagttgggggttcttgtgttgacgcttgttccttgtcgtagggcgtcgagccttgggcgtgcggcgttatcgggccggcgtttcctcggcgttcccgtcgggcgtgcggcgttatcgggtcggcgtttcctggggcttgtgcggcgttatcgggcctacacggggggtcttgtgcacggcggttatcaggccagtgcggtccttcgcctaggcagcgcgttatcgggcgcccacgtaaacggtatacgtttaacgtgcctttgttccagcacgggtctgtggggggtgagcacccgaaccagcaaacgacggggggccgcgatatcgaggcgtctctacttgccggcgcttggtggtttccctggaacctcggagaagacgggaggtctttgtggttcagagaagtttcgggactgagtccttaccttatcctatgtccttgctactggctactctgtactaccgcttgctaagcctaccgttctgtgcctatccttacttctgtcgtgcttgcactaccgtgcttcaacctgatttacgtggcgcaatcaagatcttacctcggcgcgttttgctcggcgcgttttgctcggcggggtttagggtcggcgcgttttgcagaaccgggcgcgctggtcgacccgtcggatgattacgcgtcgcactggattctggcaccgtgtctcacggcccatcacccacgccgactttcccgtcgagctcggccctgcgtcgcgcccatccatccgcgtcgcgttccatcagccgcgtcgaggtccatcactcgtgtcctggcgccttcttcctccggcgcccggtgcgcccacttcttctgcggggtactacaccacaccaagtcgaggaaacatcacctcggtctgatacgtccagacagcaagccactcgagcgcagcggcttcttggactcgagctttatactcgagctctttgaaaaaaccctccttggtatgctcccggatagcattctcgtcgtacgattcatctgcctccatgacgatatggtgttcaacatgggaatcgagaaaaacgtctaagcgttcaatatcccaatcgcacaggcgctgtcgacgctttatcatagacagcgttatctacacagaggtcaatgggacgttagcgttggaagtacacctgacaccacagaacgcgtgaaataccttcgaggctttcagggacgcttgcaaccacgcgtagatgtgattcgagtcttcgtcattctgaaactgcgtatacatctcgtagtgcgggagggcggctagaaatgcgtctacatggttggtagacgcatttctaggctcgtaaacctgttgcataataacatttgttagactacgccacagaactcaagtaattcgcatacccacccggtcgtgtgaaggtttgcgtactggctggagggtgtgaaagtcaaggaacccctggtgccattgaaatctctccaacgtctaggcatacatcggaattgagtcatcgtgacgcccactgaaacaccaaagatacgtgcacgtacctcccctacagacatcgcttgccataaattttcttgttgtttgacgctgttcggttgacatccggcgtgaaagcctgttttatgcaagcaggacggttagatatcaaatagccaccacaagtaggacatacatgcgcaccgggacagcctcgtaggtgtagttaaggcccgagagaacaaagtaggaggagcggtctaagtcggtatcttgatcgctgagctgcccttggctctcgaagcgccctcgcgctgtgagctcctgttggttcgagcgttcgtcgtcatcgctgctgctgccgcccacagtgctgctgctgtcggccgccgtgtcgtcgatgtacatacttgcgtcggccatgatcttctcggagaagatctccccccacacgatgtgtactgtaccactgaggagcgaccgcgacttttcacaggttgattttgactgtcgctcaattctatggaatgactttattttattttatactagaccctaacactaaaacacatactcactacatccgcctgcaaaggctgctgttgcagtgagagcctgttttggtagcaccattgggtattatagccctcatcgctgacgccaccgctttagccaccgccattttggtcctcggcgatccgcctacttttaggcgcgctccgcactctgattcgagatcacacgatggactgcttgatcgtccggcgtcgtcctgcagcgtcttgtgatggttgacgccatcgtttagcttgaacacgcgcttcttctccttcattaagggcgcctcacgcgaacgtttgtccgtatgggctgacgtatgaccgcatcccaacagagcggctctgagagccgccccagttgtatcgataggccttgggcgaccgcgcgtagtatttgcctgggtgctgatgggctcgtagtcgaagtccccctgctacggcgtcgggcctggtgcagggcctgcatgctgttcgggttcacgtgctactggagttcatgcacgccgggccattaaagccgccgctattggtaccgtggtccagggatttgtagtagagcttggaaagttcgccgctgcgctggtgatgcggcgagtgcgcctggtactgcgagtagccgtagccctgcatggcgaagaggaaggaggaagtcaggcgggtgtacagccgatggaatggggggcttgtgccgccagcgctcgcctcgcctgcagtcgagaaacacgtcagcaatggggcaacagactggctagagtgagcagcgtaccgagattgagttgttctgctttcggttgtgcctcgtacgtctcgtcgttgcagtagaaggcgtccctcatgtgccgtgccgtgcttgccctgggatagtgtcacagcgattgccgagcacgtccatcaaccgcgatattcagctcagaacaattcactcacttagcaaatgttcgcattatcctgcgaattacaccaaggttttttcgatcgaaatctcgacagagcttaatattacggccgtatccaaactttgattggataactctgaccaatgagattgacagccggtggaacccaaagagtcggggcaggccgctggggacctcgcttaccctatcccgccaaatttctatattaatcttatccctgcaaaatcgggataagagcggtcaccggtgggttaaactacaagggccactcgcgcgttggctctcgcctgaggacggcactttggggggggggggggggcgcccctctctcgcttcgctcggggagcgccgctgcgcggcctgccccaccccgttacacaccacaccataatcttttccagacagctagcaatgcgacgtccgtcgtgctttcccggtagcaccttaatctcgaggacccagttcttgagatcaaagttgcgggatagtggagggtgaacgaaataaatgcgggcttgctcttggatgtccagatatcggccgacgcagtgtagtagtcacattcatcggcaatttcatcctttagcgtttcacggagtgcaccggcgatgttatcgacattttcacgcgctttccacggcttggccggcttgatatacccttcgacagagttcagaaaacgggagtacttccggaaatacttgtccttcagaatattgaacggccgcatggatttggcaacccaaattgccgccaacgtatctgctcgggcttgcttttccgcagtagcaggctcttgacgggtcgatctgtcagggagatcttcaacttctttatgcacgagaacttgagtttccttctttttacgagccacctccgctgcctccgcttcttgcagctctttggtatggaatttccccatgtgtttggtgacgtacaccgtggaggacgtttcaaacttgatctcagtattgcactttgtacaaaacgcacacctcgcgtgttcagagcgcagttctttctcgggcaacgtcgcaaactcgtccttgcataccagtctaatgaacatccaatgttgtggcttgcacatcttccgaatgttgaacaagcggtgggggcagcagcatcacgcccagcaccaacgaatgcgtttgaacccgctacagtagatccaggtgcgggtgaacggattttgtgttgggggcgctgagaatttctgtggcggtcgcggctttgctgcgaacgactcggcgtgtttccagtggagtcacttggaactgcaccgcttgatcttgtcacacacggattacttgaagccaagccagcaattcttggcgatcgacgtcgttgcacattagcggtgtagagaagccgagctcttccaggtcgttttcagctgagcgaccaccccttttgcgggtgttggcttcggtgccagaagccgatcgtttccctagagctgattttccagcgattcctccagcggttggaggagatgggaagtccaaacgcgaagtcgacgtggaatgagcttgagcaacataatcagctaatctgctgcaaggttggcggtaagtagagtctctcgcgtcttcaatcttggtttcatcctcaaacgtgagccgggcacgaactggggggctcgcgagcggggatatcggcggtagcgatggctcgtggtaaaatgatcgcggcgccaggaatgccttgtactgctgggcgcgatcacgctctcgagattgcgaaggcgcagcacctggtgcgctgtgctgctgtcgagattgagtactctcggcgggcgtcatcggagcggcttgacgcgtttcgggcgactcgcggggcgagggggggtacggttcgcgagcgcatggcaaatatccaaatgggcatcgaaaggtcgcagtgaattacgtatctttacgttctatttttaacgagtacgtaattttttacgtaatcgttcgctaaccatcgtaacgtagaaagccctactctttattccccattagaaatctgtagaaatatccttgtagggaagcagaaacttcgaaatgaacgcggaatactacacgcgtacgtgctgattcaatgctagtatgccaccagttgcagttatgcctaaagttttggtatttgtggcaaaaaggcgaaacaaaaaaagcttgtgcatgccatgaggttgttcctaagcatcttctagacgccacgcaaggtggagtcttcctatagtaccgtagtatgcatcttcaagctggtacacagcgtgaaggtcctcatatttttccatgaatcatgggccatgatggcagcaaggtgctattaactccgtaaactgctttctatcagcacggcgcggtaggaataataaacaccagcgtagtgtaagtaacctaaatacaccttattctatcatcgtaaactgctttcttcaaatgcgcaactaagaccatgaatcaagttgtagagtacgccgactgactggtgccgaacagagacgttcgcgccgcgtgcaaagcaggactgcacgctccgacgatcctataattcggtaagtcgccgcgaacttcaacgctgaacccctgccacctcagctgttccgaagggagctcgaacgctcgctgtcgggaagtattattaatacattgcaggcccgcctcaaaccagcggttctctctcaatcaagttatggggtactctcccaagcacatgtataaatccatcgaggctgcctgtatcgatcaagcaagggttacagcaccgctgccgcaccaccgatcgtgtcaccgcctcattcattctgcaattctcagcctgccgcaacaagcacactcactccaacacaacaagctagcaagctctgcggctacctcgcttccactccctccccttcgcaatggctgccggcgtcgtggtgaacgtccacaacaacaatgacgatgacgtcccgaccgagggctcgcgcacctacgccatcatcgtgtgcgtgttcgccgcgctgggtggcctcttcttcggctacgaccaaggcgtgacctcgggcgtgctcatcatggactcgttcatcaacgactactgcgtcggcaggcacaacttcacgtacgagcagtgagtgcacatcgtcttcgtcggacctgccggctgaatggacgtccttcacggtgtggtacaacatggcgtacaacctgggctgccttgtgggcgccttcgtcgtcggcatcgtggccgacaagctgggccgccgctggaccatcttcacggccggcctgctgttctgcgtcggcacctcgtgggtctgcttcaacaaggcgcaggagcacggcctcatgtacatcgcccgcgtgatccagggcttcggcgtgggcaactcgtcgttctcgctgccgctgttcggcgccgagatggcccccaaggagctgtgcggcatgctctcgggcttcatgcagatgacggtcgtcacgggcctcttccttgccaacgtcgtcaacatcatcgtggagaaccacgacaacggctggcgcacgaccaacggcgtggccatggcggcgccgatcgtagtcatgctcggcatcttcttcgtgcccgagagtcctcgctggacgtaactgcacaagggcaaggaggaggccgagcgcgtgctcaagcgtctccgccagaccgacaacgtgggccgcgagctcgaggtgatcggcgaccaggtcgcggaggagctggccgccaacaagggactcacggagctgctcgagccgtccatcttcaagcgtgtggccatcgccatggtgctccaggtgctgcatcaaccccatcatgagctacggcgctctgatcttcaaggacatcaccaacgccggtatttactcggccttgttcctctcgggcgtcaacttcctcagcaccatcccggccatgcgatgggtggacacgttcggccgccgccagcttctgctcatcggcgctgtgggcatggtcgtcggtcacctgttcgctgccatcctgttcacggctatctgcgacggcaacgtggacaacgcgggttgccccaaggtgggcggctggttcatcgccgtgggctcggccttcttcgtgttcaacttcgccatctcgtgggggcccgtgtgctggatatacccggctgagatcttcccgttgggcgtacgcgcgccggccgtggcgctgtcgactgcggccaactgggccatgggtgccgtcatgacggaggtggtcaagctcttcccgcacctcaacatcaacggcgtgttcttcctgttcgcgggtctgtgctgcatctgcggcgtgttcgtgtacttattctgcccggagaccaagggcatgatgctggaggacatcgaggcgttgttccacagcggcggcctgttggaatgcacattgaagaccaagttgaaggtcagagttgagacccgggcgaaagctgagactaggtacctgagaaaattagcagagctgagagctgcgggtcgttgcatgagagacgggctcaagcccgagagtagtggtaagagctgggacattcaatctttttcctttctcctactagtggtggctccaggccgtacggaccaagaagtgcaccatccaaaagggtactgagcccagcacctacggacttccggctgcacgcgggtgatccaagatggcggagccgctgaagtacactagcgaaggagttccaaagaactggaacggaaaagactggcagcagtacaaatgggcgatgatgattgtcttcaggaagaagaagctcgtggagattgtggagggcagtatcacgagatcctcgctgacctcggcggaggcagaggacgacttcgacgacaagccgttgacgatcatgtctatcatcgggatgtcgctgccagcggacatctttcaccaagtgcgcgacgagaccaccgggacggacatgtggaaggcgctttgcgtgatctacgagagccggtcaaacaagacgaccatggctcatcgcgcagagagcatccggcatgaggtggagatgattaagctgtcaccgggtggagatgttaacaagcatttaagcaagatgtttaatttgcggacggagttgctttcgttgaactaccaggttgatgatgtcgccatggttgagctgatgctgaacagcttgccgcaccagtacgaatttaagagtctgtagagtggagtgggctacaacagcgcagataacttcatcacgccagagcggactcgcgagctgattcgtgttgcggactctcgtcagaaggcataccaggccaagagcgggactggacaacgcggtaaccagaagattggtgtgactagcggggctggcagtaaggtgaaaactggaaatggtgaggaccaacaactgggtggcaaatttaaggactcaaagaagaaaagacccaagaagtgcttcatttgtgggagcaccgagcacttgagggctgagtgtcctgatcgagtggagggcaaccacgggggcggagctaatactaatgagcagaagcggaaaccacgtgcgaacatgacgactcggcacgatgcgagccgtgacgcagattcgtccagcgagaacgatgagcttggcgagtcggcgagtcggctggacgctctgataattgatgcagggttgtcagctgattctggtggtgctgagagactagcgacatcggaggatgaggaagaacaggaagggaatgactctcacgcgcatgttggctggtggcatgacggccaagaccatgacgaaggcgaagcaaacaccagcagtggcttgtggtacttcgacaccgccgcgaacgtgcacgtgacagggaacccctggtactatgttgcctttactccggatccgagtcagtcccagcatattcaaggcgtgactgctgctttggcttcgcgaattgctggagtaggcacggtagcgctgattactatggttgatggagaacaagctacagtgactctgaacaatgtgttttacgtgcctggtgctacgcacggattgttttccattggactagctgctgaacagggctttgattttgattatgatcgtcagtcacgggactttcgagtgcaagatgaagggaggacagtgattgtggcaagtccacatgaggcaacgtggggattccaggttacccacccgtctaatggtgatatcgtcggaccgcaggaccagcttctgagcaacttcacggctgcggacggtgtggcatcgctcaggctgtggcatgagcggctgggtcacacttgccctcagtatctgaaggtaatggtcgacaaagggctcgtacgtggcatgctgattaagcagcgcgaccttggtgcctgtgacgcgtgccatatcggcaagcaaaagaagaagccgcacctaaagaagctcgagcggaacacgaaaacgccaaaccaagtggtctacgcggacctgctgatcccgagcaaggacaacggtactcgtttcgaagctgtgctcgtcatcatggacggattctccagattcgtgacgctgcacctgcttacgagtaagtctagcgaagtggtgaaccgccacatcaaggaatatgtgttgtgggcagaaagacaagctggtcgacacaaggttcgtcaagttttgacgagaacgctccacgtcaaatacaaagtttgccaaatcctgacagacacgggtggtgaatttgttaacacggagatggagttgtggtataaggctcatggtatcgagcgtgttctggttggcccgaagagttcgcagctgaacttatgcgagcggactcatcagtctctcgtggagatgatgaaggcgtcgatgcacgatgctggattttctaagagtctgtggcctgaggctctacggaacgcggtgtatatcaagaaccgcatcaacaacaaaggcacaggtggggtcccgtatgagatgctgtttggtgtaaaacctgacttgcatcacgtacgcaagtttggcgcgctcgcatacgttcacgtaccagtcacaccaggaaggaagaagcaccatgacaatgccagattgggtttcgtactcggctacgctgaggacgtgatatactgtaaggtgtatttcccggacaatcgcacagcaaaatttgtgtcggacctccgtgttgcagaggatgtgatgtaccgcgacagacatgaagtaactgtggaggaagatgacttggagtctttgcactttgtacaactgaggacgtgatatactgtaaggtgtatttcccggacaatcgcacagcaaaatttgtgtcggacctccgtgttgcagaggatgtgatgtaccgcgacagacatgaagtaactgtggaggaagatgacttggagtctttgcactttgtacaatctggtgagatcgtcgaggacgacgacgctgtctcgacactctatgagtctactatggagttggaagcagaaggcaatactgccgccgcgccatcggtgcacgagaccatggccggaccgaccgtggatctcaagagaggcgagatgtgtggcgctccgagtgcagctccaagcgcaagtgcagctccaagcgcagaggcaagtggagatttgagtgcacttccgagtggcagtggccgctcacgcacagataccagggaggcgtctcgagcgacaccagctagcagtgtggtggatgttggtggagtgacggtagcactacccagtgagcctgcagaaatacgaagtacgcagacagaaacacagtgtgagcttgatgaattgcagagtgagttgcagagtgagcttttgactgggagtcaggatgattgtccgagtgatgacacggaaccggagcagcactcatccgtgatagactcacctggaactatggattcaccacccaaacacgatgttgctgcaacgtccgatgctgcatcttgtgacggtagcgagtcggttgctggtcagtatagatctgacgtaggcgacacggaggaacttgatgatggaaatgcagtggctgctgaagaggaacttgacgatgaggaagcgactactgttgcgagtgtctgtggaaaattgatggggaaacgtcaacgtgacgagaccccttctgaggagattcgtgtagagcagagtgctgagaggcaggagccaaagcgaactcggcgcactgggctgcgcgagtatcatgagcgtcggcgcccggcctacttgcgggactatgtgatgaatgtgacgcagaacacgtcacgggtgttggatcagaatggccgtccgatccgagcaagtgatgtacgcgttcctcgcaaccgtagggagtctcgacgtagtaagtaccgggtttttttcataagggcagagctggaggagatggctgcgatgagggcacaacatgttctggaggagatcaccatcgaggacgtgcccaaagacgcaaagccaatcaagacgagattcgtgtacgatatcaagacggacccccaaggctacgtaattcgctttaaggcgaggctggttgcacttggcaactgccagcgccctggaatcgatttcggtgatacgttctcgcctgtggctcgtatgtcttcgtttcgtttgatggttggactagctggagcactgaatctgacgctctatggcggagacatcaatacagcatacctgaacgcgaagctaggaatacgaaagtatgtgaggtcgattgaggggttcccctgtgaagtggatgggcacgtctacgtggtaatgaaggcattctatgggttaagacagtctggacgtgaatggaacaccgagttgaaccggtggatgctggatcgtggctatcaacggtctttgactgaaccctgcctgtattattatgttgaaggtggggagatcatgctggttttggtctatgtggatgacatcttggtggcgaccaaggatgagaagttgttcgaagacctggacaaggagtacggacccaaggaccagggacttttgacgcagtatctcggggtggaagtggagcaaaccgctgaccgcttcatcatccgccagagcaagtaagctcgagaaattttagagaaatttggctaagctgaggcacactcggttgggaggtgaatgctcgcctcgtgccgcttggtgatgatgaagaaagcgacaccagttttccatatcgagaggcagtgggtatgttaatgtatctggccactagtacccgacctgatttggcgttcgcactgagccagctgagtcgctttgtagcaaagccatccagcaagtatgttggggctctgaaacgagtcctacggtaccgcgcaggtaccgtgaactatggaattacgtatgaccgacagtcgagcgagtcgaagactgtggtgcttgagggctactgcgacagtgactgggccaacgacccggagacccgcaaaagcacgacaggtttcgtgttcacgctggctggtggggcggtatcctagatgtcgagacgccaattcatcgtcgctctatctacggctgaggcagagtacgtggccgcctgtgaagcgacaatggaggcagttgcagaaagcaacattctgcaggaaatactgccacacaagtgtctgaagctgcgcattggtatcgacaaccaagccgcgcacatcatggctacgaatcctacctacagccgtcgcacccgacacatttgagttgcgctggcactttgcgcgtgagcaacttgaacgaggcgtgattgaactgcgcacaagataagaggcgaggtgaaccccgctgacactttcacgaagccgctcgacacgctgcgtctgcagaacatgctggggctggccggcattggtgatgcagattagtcgaagctcatgcttcgagggaggcgtgttggaatgcacattgaagaccaagttgaaggtcagagttgagacccgggcgaaagctgagactaggtacctgagaaaattagcagagctgagagctgcgggtcgttgcatgagaaacgggctcaagcccgagagtagtggtaagagctgggaggctcagccattcaatctttttcctttctcctactagtggtggctccaggccgtacggaccaacaagtgtaccatccaaaacggccaacagcggcccaagtcgcccgcgttcgtggagatcaaatctccgcagccctcgctggcgtaagtagaatcggttcgggtgataccattttgtttcagttccatctacagtagtccgttttgtagatatcacgtcgcgttttgtcctcctcacttgtctgcattttcgtacctcagtacaagtacatcatgcattgatttcgctacgaggtgatgttgtaagtaagttactattggttggtgtcattgcaacacatacagtaggtgttgttgcacccgtcttgcactgcaagtgcacgagttgtacgtttgacgtacatgtattgtgctcaccacgcattttgcctagctcagtgtggccagccctggccggtctcgtgtctgccgcagtgcatgttgtacgatcggaagcaaagctcgctctggtgcttagagttctagaggccggattcgagaagctgtacgaattcgtaggcaaaagccaggagcaggaacaagcactagtttagagttggagctaacatcagaattcattttactttccttggcatactggtgaccacactcagctctaaatcgaccggtatttggagatttgcgctctatttccccaagttacgataccggcatccctttgtcaacacatacctattacatataatacacctatttaccctaatctcactaacacaggggtcggaaaaatatgaacaaaacaattattatggtattgtcccacaacaattatttattattggaagttcatgaaaccaatacaatatgatattgccccaataatagcaatacaatatcaaattctggggttggtcgttcataaatgagaccgcgtcgaacaaaaagatactaatcaaccaaagtacgaattgggatttaggtacctcgttggaaagaggggcgtcttagctaccttttgaggccctccacaacttctaacagttagattagccaaagatatgaccccgcgaaaaaattatctcccgtcccagagcaaaattaagatttttttattggctaccctggtgtaaaattgtacagcggatccaatgatacccttcgtttcttcaaattcgcattgaaatagtcttaaaacttcactttcgtgcgatgtttcacattagtgacacatgctgtcaattgatatcattttggattagcatggacataagtatcacattgattgatcagttgggctagacgacgtacattgctacacttttgaactaaccagagactgcagctcttgagcctttccctgaaggcagcgacgctcacacttgtcagctctgataaggcctgtcaccttctggtgaatatcaacctcgatcaaattgatacttatatcctcttcggcttgctcatcgtcttcgattccctcgctgtcccccgtcacctctctatcctcttcagctgactcggccgtgctccaatccttatcatcattgctttcaccaggctcctcgctctcagacgagacgtcgctggcggcatgtgccgcaacgtgcggggaggtcacgcggggtcgatttttctggttgcgctgccgatcggttcgagaggcgtgcacgccggtgattcgtgcagctcggaggcactgtcctcctgctgcggatcggaggtgcgcgcaagctactgcccaggagctgccgaagcgtgctgctcgggcgcgtacggcgtatgctgctcgggaggaggggggtgttgacagggaggggactcgggcggccccgaggcaccaacggactgtggcgcgagagcgccggaagcctgtgtgccggcgggcgacgactcggggccgctgaaggtctgcgatggcagctcggaggtcgagcggtgggctaccatgtcggcggtggtgtagatcttctttgagagtgaggtgttgagggagcgttcgctttagtgacagttcaggtttttaaatcacaaatcgggccctttctcgaaacttcacttagatacgaaaaatagcagccaattttcaagcgcgattatctcgataactctaaattgtggcttagtatcattttgttcgaggcagtctcaaatgatgaaaatgaactattataatctctatttttcgggtcgaggacacagccttgggttgcgaggcttttgtggagcaagcggtgtatactcaatagcgctttgccggacagcaacactaaccaaaaccgtcctggaaacagtacagggttattgtaatcgtcgtcagcctccacctgtattttctcactgtataggttggcctgacacctcagcaatcgttcgatatcagccatgagacgtttgcgtaaagttcgcgtgaagtttgcggccttcctgtcacattttggcaatgaatagctcatgtcacgaacagggctgccgaatatggtatttttgtttattagtgcagatagagcctcataaataatgcaaggatcttgtcatttgtacctgcataaataatgtaatgtattcgagcaataaataaataatgtggtgcaacttcaacgtgtattagacgtactgttactcacactaattgacgtgatcgactgtcgaaacgtcccagaagtcagcattctcgcgcagaaacaaaattgtttccagcgtagcgggctggagactgttgcgttcttgagcaacgtggtacgcgccacgctgaaaaatcgctcgaccttgttcgggatgctgaagatgagatcgtagcggggctttcgcgcctcgagccggcgacgcttctcgagacgctggacaaacgaacctctggcacctcgccgccgtcttccgcaccgttcgtggcgacggccgaggtacacgctaacgcacgcagcacccgtttctctgcggcggtgagtcggacgctgctgcccttcaggatacgcacacaacccgcttcaaaatcagggctgtggacgatcgtagcgcgcggccctaaattaatatgcagaaacgaaattagtattaatgagcaatatcacagagtaataaggtggtacataccgatgtagtccgcaaaagccgggtgcgctgcgatcatcccgccgaaccacactctcgcatcaaggagagtaacatcactgccttgtagagcctttgatacagacttgatgtctttcaactcggcatagaggtccttcaagcgccgcttgcaggccggagacggcagcaaatccaggatatcatcgtcatcggcgtccaggaacttggtcagctcatgataccgatgcaccataccatgaaatatccgactataggacttatccgacctgtaccaaaaacatggtaccctagaaggatggactctaaaaacaaatatataagtttgtgtattatgttgtgggccacacaccgattacacttttgctcatttttattctagcgttgggtggcggacttgcgtggagggcagagtgccggaggccgcggcggtggcgccgagggaatccggccgcaggaagacagcggcaggtagcaagctccaggacgacggtgaagccgcaggacgacggcggcaggaaggactggcgaagcggcggcaggtcagcggagcggaggcaggtcggtggctggctggacggcgaggcggcggcggcagggaggcagcagtaggacggcgactggttggtggggcggtggcggggcggacggctgcccggagaaccttgatgacttgcccggcagggcggccggcaggctgcccgttgggtgagcgcctgcaagctgcggcgcgccctcccgacagccccccgcggcccgcagaagcagctgccaccaccaccgccgccgtgaagaccccgcgagtgctagtgccttacctggcaggctggcggcatgctgctcggcccaagagctgtgtgctgcgcgctgcatgagcacgcagcacgtgcggactgcacgatgccaaccacgctgcattgttataagattattcgttatatagtaaacgtatatttaataagactcctccactgttaatgtacatgcctagcggcttcccttacgcgctcattatagacaccatgcacgctcatacattgctacatcacgacgtcgagatggccattttcagtttcaaatactgcatatgtacctcaattatggtacaggtccgataaggtcggataaatgggatatatgcgtgtgatacgagtttatctaagtatttgtatagacatacacatattttgcaagtccctccgacccgatacgtccgatagcgtcggatatcggacttccctaaccctatcgcaatatattggccgaaactctgccatgacctccctatgattggcgcaaataaatacaaatgctgtaattggctgttaataggcatacaataaatacgtaaggtcggataactcgtcatattcaaccatagcaaaggtggagccccatcgcgtatcctgacggatgatcgggcgcagcggggtcttgaagctgatattacaagcaacaatataacaaatagtaatccaaagtattaatagtacaagacttaccgaagtttggctgactgtttcagcgtgcgaagcgtcagcatgagcgcttgcacgaccgccaagtcgtcctcgtactgctcaaggtggcattgcacagcccggttcagcctgtgactcgcacagccaaccagagggacctgcatgatgacagcaaggcacctgtttacggagcagttgtctgcgaccaagaaaacgcagccactcagcgttttgccgaacccgtccagcagaccagccaggaaatctcggtgcgtacgtgccgagaggtcatcgtccggctcttggatgattggggccatgctcaggagagcgtactgagcaacaccgttgatctcgtagtatatgaatactgcgacacagtacaccgacgcatagctccagccatccaacatgagccaaaaacgatccagcagctccgccgcgatgtccagccccactgactgggcgaccgcctccatgagcgccttcagggtctcgaccgaaatcgggtccagactcgtgtacctaggaaaggagtactgcataattagtattcgtaaatagtatagcaatagtagtttgagcgtaccttcgtgcgagagggttctcgcaaaagacgaggggcaggttagccttgacgacccactccagccagccgaagcggttcaccgacgtacggcgagcgtagtggatcagtgagccggtctcagctgttgttgcagagcgcatctcggcttcgaagcccgggtgctcttggcggacgtgctgcatcaggttggtaaacccgttgcgcctcgtctgcttctgtagggtaccgcatcggaagtagtcgggcacaggctcgtcgtactcaccactgcacggtgtgaagaagtacgccgagacctgcgcgttggagaaacatgggcgagggcggggcgcgcgcagcatgctcgttgaggtgaggagattcgtgtgctgttgaaagttgcaaaacggtgcttagagctgagctggcagccgcttggcatgcctgtcaaacggttggcttccagacagttaataaatctgcatatgacttgttgtatgagtataagctttcctttgttcgcatactacatcgtgtatgattttgagatagtatcataaattatgagtgtggaatagtagtctggtatcataaataatggtacggtctaagccaccgctcataaatcatgcaatgatatttatggcaattacttgagcgtcaatttatttttcggctgccctggtcacgaatggtacaatatacttaaattgtaccgattattattattggttgcactcatattgccgttattactactgcagctttggcctcgcaatacaatttcatactgtattgtccgacccctgcttggagcaatgcaaggcaagcatgtgcatctatttatctagcagtaaaactctttgtcgaagtcgtcagcttggcctactgccatatcaacggcaagcagacaataagctcagtcacctgtttgactggcgttgtgtccgatctctattgcccttagctatacttcttcctcaaattccgcagcaattttagcgaggatctgtccttaccgagcggtggcaataccatcgtctgggcttttcgcttgtctgctccgcttggcgctgcgtacagcagctcggtgctggtgcgtccgcgcttccagctctgggtgaacgttcggttgggtagtttagagtgatggtggtacggatgttgccgggcttacgaggtggtcaaaaacgtcgaccttctctgcagccggtgacgatgtcaccgagtaccttaatgcttcctcccctttccgcctggcaggcgaggccgcccgagtcagtccgcaactgagcataatttgtagtaggcgaggagcgcctgtatgccataacaagtgctaaggtgaaaataccattgattggctaatatttgcatacgggctgctggtagcccactgggtaaaggtcccaggaagtacgctcttggccggagttcaaatcccaccaaggacaaaaaaggaagaagaataaattgatacactctccaatcaaatatctcatcacaatcattcaacaatcattacctttgacacccaattcacccaaggaagatcagcaattcagtttcccacaaccagcaataatcagttaatcaaatcatcagtttctggctaatattagcctgtatggatttgtatatgtgcttgggagagtagtactctcagagtaccccataacttgagagagaactgctgctttgaggcggatctactactgtataacatactttctgacagtcagcgtttgagctcgttggcatcgaacagctgaggtgggcagggcttcagtgttggagctcgcggcgactaattagggggaaactatggagatcgagggtgcaaaaccatgcgaaaggcaaaatagtcgtaatcaaaaattatcatcgtaccaattataaagtcgatgtatttatagtccgcacattatacatgtaatacttaccacggagcctgtacgttagagcccgagaaacaaaagctgtcagccctgtgctacatgaacgagttttattatatatattggccagtgagcttactattttctgcattataacccgagaacaaaatttgcactggcttcatgtcaaaatgcatcgatttcttatctactctttgtagaaatgatacttactcgatacgcgtactatgggttcatgacacggtgatgagatgtatattccaggtattccattctacctcagtctattctattctattctattctattctattctattctattctattcagtctaggtattccattctacctcagtccctgctttaaatgaccagcaactaaaattgtactttatcaggcttgtcacgtacaatgtagcccagttgcatttctagcggttaattcagtggaagatcagtgcgtatattttgtcgccacattttgttttggtgagggcgctactggtattttgcagaactaatttgaggaccaaatatgcatgctaattttgatccggactatttgcaccctcgatctccatagttttccccctaattaggatcttcggaacatgctgtcttgttttgcacgttgcgccgggacgtctctgctcgacaccagtcaatcggctactctacgtcttgattcatggtctgagttgcgcgtttgactattacatgtagaacaagttatgatgcaaccatctgcagaccttcaccctgctgcgtggcattttaaaagcggctccaactatcatggcatgtattacgcagcgtttaatggcacggagctcatttcacaccatgcatgctagcctccaaatcctgaggccacgatgttttctgatgtggaagtcaggtgtagagtagaacaaaggtccgacatatctagtcgattcatataatatatttgagacggtttcaaacggaatgatgcttaggcgccatttggagttatcgagataatcgcgtttgaagttgaccaatccattttcggaaataaccggacatcaaaatttcgaaagtgaaaagcacacgtaaaaagcgtaaataaactctgattcgcttcattttagcgcgagctttccaataatatacaataggttaaaagtgaaaaaatattgaggtcacacgcctcaaataaaatcgtgagtttaggggatccgaaaatggagataatttttctagaccgatgtcactccgcgagttcttaacatttcaaagcattcgatagcttaaacgaagcacaagacacgctgctttcgattgatgcggttaaatcgcgattcgtgcttaggttcgtaagcatcttttcgtttgaaaccgtctgcatattatgcacatgtaccaggccagctaaataccccagctggttaatatgagagcgatagtgtcgtctccatgatcggtctaataaggagtgactcgaggtatataccggcatccctttgtcatcacatactgcttgttatgaccgtttcagtcattgtgcgattctccgtctgccacaacaggcacactcacttcaacacaacaagctagcaagctctgcgactacctcggtcccactccctcccttcgcaatggctgccggtgtcgtggtgaacgtccacaacaacaacgacgatgacgtcccgaccgagggctcgcgcacactgagaggtcatgggctaaaatatggatttaacatgggatcggtattgtttcggatctctgcatcgattgacgctattcaaattagtctggtaaactcaatttgcgatgggtttgcgcagtgggtcattccttaagcaagctgacagagacgcaagtgaacggagagtacccgaggtgccgtagtacccgtcctaaacctggtttacgggcgacttgacctcgacgaattcgggcgacttgggcaacttgctcttgttgaacagcccctcgatatcttccagcatgatgcccttggtctccgggcagaagaagaagacgaagaccagacagatcagacacagacccgcgaacaggaagaagacgccgttgatgttgagcgacgggaagagcttgaccacctccgtcatgacggcgcccatggcccagttggccgcagtagacagcgcaacacccgacgcacgcacgttgagagggaagatctcggccgggtagatccagcacacggggccccacgagatggcgaagttgaacacgaagaaggccgagcccacgcagatgaaccagccgccgaccgtcggacacccggcgtcgtcgacgttgccgtcgcaaatggctgtgaacagaatagctgcccacaggtggccgatgatcatacccacaccaccgatcagcaacattgtgcggcgaccgtaggtgtcgacccagcgcatggccgggatggtgctgaggaagttgaccccagagatgaagagcgccgagtagcgccccgagttggtgatgtccttgaagataagcgcaccgtagctcgtgatggggttgatgcccgtggcctgctgcagcacttgcagcatcatcgcgatgatcacgcgcttgcggactctccgctcgaagatctccagcagtcccttgtcgtcggcctcctcctctgcgatctggtcgccgatcacctccagctcgtggcccacgttgtcggtctggcggaggcgcttgaggacacgctcggcctcctccttgcccttgtgcttgtatgtccagcgaggactctccggtacgaaccagatgcccagcagcaccacgataggcggtgccatggagatgccgttggttgtgcgccagccacggtcgtggttgtacacgatgatgttgacgacgttggccaagaagagtccgatgaccacagtcatctgcatgaagcccgagagcatgccgcgcagctccttgggggccatctcggcgccgaacagcggcagcgagaaggacgagttgcccacgccgaagccctggatgatgcgggcgatgtacatgagcgtgtgcgcctgcgacttgttgaagcaaacccagcacgtgccgccgcagaagagcaggccggcgcagaagatcgtggcgcggcggccgagcttgtcggccacgaagccgccgatgaaggcgcccacaaggcagcccaggttgtaggccatgttgtaccagaccgtgaaggtggtccactcgtccggcaggtcggacgtggagcgcgtgcactcctcgtaggtgaagttgtgccagccgacgcagtagtcgtagaggaacgagtccatgatgagcatggacgacgtcacgccctggtcatagccgaagaacatgccgccgagcgcggcgaacacgcacacgacgatggcataggtgcgcgagccctcggtcggtgtgtcgtcgatgtcggggtgctgcgtgctcacgatcggcccgcccgccatggttccgaagcagcggtcgcgaggagatcagcagggagggagcccgtttgctctcggcacctcttgcttgcgaagaagattgaagagtgagagtgaccgaagaccgcgcctcgcttcggctggctggcccgcaggcagcctgcgctgcaggttcaagcaacgaggcggccggtctggcatcaccgacagtggctgcgaagcgaagcgacttgcagagcgatcttgaagttgtcagcggagactatagtcgcgggtccctgtcacgtcgacggcgagctcctctccgcttgatttatccgagccatcacgtgatgccctattcgttttgcctaccggtctgtactgtagtgcacgcaaatgctgttagccggctcaggtctgaagtattcccagcaagggtcccagcgaaagcatactctggttcatacgatcgcgctcggtgccactgtagtgacggtgctagcttgaagttaggcccgcccggcacaggtccaaagtgaggttgtcgctctagtcgtgcggtgaggcggccgcatcttgtactatgtatgccgtccagctgcaaggctgaagtgcaccggcatcaagtccctcacgtacgattctgccattgtggcggagagcattggcaccgacaagacgaggcattttcgcaagcgggacgagggtggatgtttaacaagatcgccggtactgcgtcaacggttcccaagccgcggttcgccgactagagcgcgctgattttaattttttgcgttgtgcggattctagcagagtgcaaaagctctctcaagactcgagtcgagcatcatcaacttgaactctttagtaggagtgacaactacttgattcatcggcctggacgttggcctcgccggctgcgagtcgttgtgcgcgagagtgcaagtcgccttcatatgctatcttcggggagggcggcgcacgactgtttgacgtaagccagcgagttgtgcgtgtgtgtggcgctgtgtcacggccacggcatgcattgcacgcggtgcagagatctaccgcattagttagttgggttgcgccttaccgcaacggcgccgcttggatcctgcgttcctagtgtccattgctccggtcgagctcgaggtcgtggggttcttcgcaggtttgcgagcttcctactggggtgacagcttcgtcttcagaagtctgaatcagcgaacttcgactcgagcaatgggctgtcaactgcaacttggtcccgcgacagtaagatctgtcttgaaaataagccccgggtctaaagctctctccgtcaagttacctcttgagtaaggtccatcgactgctctactaatatttaggagactaaagtactaagtattcagaagttctgatagttctgaatcagaactattctagcagtacaaactgtaatattcaatcttatagtatattgcagaagacagttataccatcctttttgaatttatcgaacaaccagacatcatagtttcaataagcattattactaccagactatgttacagtagttagaaggaataataaagttattagtccctcatatcaatcgttaatttgccgaaatgatgttttgcctaaaaattattgtgaaaaccggctaaaacgcccatctgtagcaaccccttattagatctcaatcactaaactaatcagagtacaaatcagggctgaaatcgatcatgatctagatgcatcgcttgggtgcgcgattgcccaataaaggtgggtattctgctccaagcgcggctatatcgacttgacttccataaaacgatcgcctaatctgcacatccactaacatatgcatcgcaagacgcgatcgatttacaaatcgatcaatctaaatcagggtgctaatcaatcgatttacgagcaaaataggcaaatgaagtagtaattcatcaaaatcaacagctaatacaccgctgtaaattttatcccaacggaatacaatatatattcaatcttaaccccccagcgcccaagctgttttatacctgtttttttatttcacggtactcgccctacatgatagtcgtacagcatgttaaatccgctcaatacttagttttactatagtctcgtataagttcgagtaccgactgtgtacaacgacgacatggtcatttcgtcaaatcgtttattatgttgttaaaacagcatgtgcatggtgtatgagacagcatgtacatggtgtagatacaccgtgctaaggacttttgatgagaagtcagtggctttttttatcaagagactgggcaaggaactctaaggaagtgcaaagcagggtgacttgcacggcatcttgcacgaaagcgacgacgcatcaagtgaaaccgttcataaacctagcgagttgtagccttgaactatcacttccacatcatttcccaacttactacagaggtccacagcacacataagcaacctgatctttgtatacccccctcaaatttgtttccattgcaggataaataccagtcgattcactatcctgttcctaattccctctcaaaccaccattttacttcctaaagtatccgggaggatggccggtatctacgctaaaacacgcttcacgctcaacttggcacaacggttcttcctacactatatacaccacttccgtgggccctctataacgcgcacagttagttgtaagtaatacaccaccagttaacttacacaatacacgcaataaatatcaagtaatggaatccttgtcgattcagtagcggtttctttctatctaaatcgaatcgacgtagcaacggcctcgctttgtatttactctagcacgcgttcgcacagtttatatccgtttatatcctgtattctgctccgccgaacccaagccatgtgcattttgcgggatggcctgacttatgcagctaatccgcccatgttttaacatgttgtacgtacaacatgtttcttggtgtatctacaacgtgtgggcgttgaggggttatcaatttttttgcacttttgaacactagccaaatctcaatacacaatgtaacaagtcaatggctttcaggggcgtacaagctcaaatctgtggctcacaggtgctgagcgaagtcaagctcgctatactgcagtgatccatttgatattgtttctggtgagctaaaccaataccaggacacgattcattctcagaatgggccgcttaaattacctaacccttttaatctcacgctttttagacttgcgccttactcagaactatggctagcaacggtgaccgttttacatgggcgagactaatacatacaagggtgtccatacgtacgaaatactggttccaccgcatggtaactaagcgatagtcgctcaacttacatgaaatgtgtgcgtaaccgatgttctgtaacgtagatctggggagacggtgaagtgtagcctgctcggcaagtcaagacaacgtctatagtttaaagtccgtgtgctacgctacgcacacggactttaaacccagaaccaagcacggtcatatctcgctcaacccgatagaagtatgcctgtagggagatgccaatcgtgtacaggcgtgagccacctagcgaaagccgtgtttggacgctcaacactcgatacatccctacttgccgccaacagagcagacaaaatctcaatcattgtcgttagtactacaaattagactaactgatagggctgtttcgtgcagtgctcgaaagtgcacgaaagtacttatgtgcaaattcgtcagccctttattacggggatggcccatcaaccattttgagatggttctgcgcaaagcatggctaactagcatgttttataaaatcactccaatcagaattttgaatgataattttagccagtaagggtcggggcggtaaccgtactaaaacatggctaaagtagcatgttttacattaggtacgaacaaaaccaagtcttatgtccgattttggtttgcgggttgcggcgtaaaaccatgcatctagccatgttttatggtattgtattgggagttacccatacaaattccaagtataaaattcatcgcaaaagagttaagacatcaatagcggttctctactaagtatgattaaactcatgaaattacagacataactctgccgacactggtgcacgaaacaaccctactaactgacaacatatcagcttcataaccgtactattactcaatcttaatgaacatcgtagtcaacactttgtttatacctagcgtaagattttgtattgtgagccggaagtaaaacaccaagattagatttgacttggattttacagcgggtttttagctgttgattttgatgaattactatctaccttttaggcaaaacatcatttcggcaaattaacgattgatatgagggactaataactttattattccttctaactattgtaacatagtctggtagtaataatgcttattgaaactatgatgtctggttgttcgataaattcaaaaaggatggtataactgtcttctgcaatatactataagattgaatattacagtttgtactgctagaatagttctgattcagaactatcagaacttctgaatacttagtactttagtctcctaaatattagtagagcagtcgatggaccttactcaagaggtaacttgacggagagagctttagacccggggcttattttcaagacagatcttactgtcgcgggaccaagttgcagttgacagcccattgctcgagtcgaagttcgctgattcagacttctgaagacgaagctgtcaccccagtaggaagctcgcaaacctgcgaagaaccccacgacctcgagctcgaccggagcaatggacactaggaacgcaggatccaagcggcgccgttgcggtaaggcgcaacccaactaactaatgcggtagatctctgcaccgcgtgcaatgcatgccgtggccgtgacacagcgccacacacacgcacaactcgctggcttacgtcaaacagtcgtgcgccgccctccccgaagatagcatatgaaggcgacttgcactctcgcgcacaacgactcgcagccggcgaggccaacgtccaggccgatgaatcaagtagttgtcactcctactaaagagttcaagttgatgatgctcgactcgagtcttgagagagcttttgcactctgctagaatccgcacaacgcaaaaaattaaaatcagcgcgctctagtcggcgaaccgcggcttgggaaccgttgacgcagtaccggcgatcttgttaaacatccaccctcgtcccgcttgcgaaaatgcctcgtcttgtcggtgccaatgctctccgccacaatggcagaatcgtacgtgagggacttgatgccggtgcacttcagccttgcagctggacggcatacatagtacaagatgcggccgcctcaccgcacgactagagcgacaacctcactttggacctgtgccgggcgggcctaacttcaagctagcaccgtcactacagtggcaccgagcgcgatcgtatgaaccagagtatgctttcgctgggacccttgctgggaatacttcagacctgagccggctaacagcatttgcgtgcactacagtacagaccggtaggcaaaacgaatagggcatcacgtgatggctcggataaatcaagcggagaggagctcgccgtcgacgtgacagggacccgcgactatagtctccgctgacaacttcaagatcgctctgcaagtcgcttcgcttcgcagccactgtcggtgatgccagaccggccgcctcgttgcttgaacctgcagcgcaggctgcctgcgggccagccagccgaagcgaggcgcggtcttcggtcactctcactcttcaatcttcttcgcaagcaagaggtgccgagagcaaacgggctccctccctgctgatctcctcgcgaccgctgcttcggaaccatggcgggcgggccgatcgtgagcacgcagcaccccgacatcgacgacacaccgaccgagggctcgcgcacctatgccatcgtcgtgtgcgtgttcgccgcgctcggcggcatgttcttcggctatgaccagggcgtgacgtcgtccatgctcatcatggactcgttcctctacgactactgcgtcggctggcacaacttcacctacgaggagtgcacgcgctccacgtccgacctgccggacgagtggaccaccttcacggtctggtacaacatggcctacaacctgggctgccttgtgggcgccttcatcggcggcttcgtggccgacaagctcggccgccgcgccacgatcttctgcgccggcctgctcttctgcggcggcacgtgctgggtttgcttcaacaagtcgcaggcgcacacgctcatgtacatcgcccgcatcatccagggcttcggcgtgggcaactcgtccttctcgctgccgctgttcggcgccgagatggcccccaaggagctgcgcggcatgctctcgggcttcatgcagatgactgtggtcatcggactcttcttggccaacgtcgtcaacatcatcgtgtacaaccacgaccgtggctggcgcacaaccaacggcatctccatggcaccgcctatcgtggtgctgctgggcatctggttcgtaccggagagtcctcgctggacatacaggcacaagggcaaggaggaggccgagcgtgtcctcaagcgcctccgccagaccgacaacgtgggccacgagctggaggtgatcggcgaccagatcgcagaggaggaggccgacgacaaggggctgctggagatcttcgagccgagtgtccgcaagcgcgtgatcatcgcgatgatgctgcaagtgctgcagcaggccacgggcatcaaccccatcatgagctacggcgctctcatcttcaaggacatcacgaacgccggcatctacgcggccttcttcctctcgggcgtcaacttcctcagcaccatcccggccatgcgatgggtggacacgttcggccgccgccagcttctgctcatcggcgctgtgggcatggtcgtcggccacctgttcgctgctatcttgttcacggctatctgcgacgcaacgtgggcgacgccggttgccccaaggtgggcggctggttcatctgcgtgggctcggccttcttcgtgttcaacttcgccatctcgtgggagcccgtgtgctggatctacccggctgagatcttcccgttgggcgtgcgcgcgctggccgtggcgctgtcgacggcggccaactgggccatgggcgccgtcatgacggaggtggtcaagctcttcccgcacctgaacatcaacggtgtgttcttcctgttcgcgggtctgtgctgcatctgcggcgtgttcgtgtacttattctgcccggagacgaagggcatcatgctcgaagacatcgaggcgctgttccacagcggcggcaagcccaagtcgcctgcgttcgtggagatcaagtctccgcagcagtcgctggtctaataggcatgctatgatcaacaacaacaacaacaacaacaacgtcacatcatgctgtagtgttttgagtcggcgttgcagactctttatgacaatcgctaacgcatacataccttcgtagttattgctgcaatacacatatccctacgaatacactcaatatctttgttgccattctgtttgcatcggtctctctgcactacatggagagtactgtacattttcgagatacctctccttcggctagagaaagataacgacaccgcatcgatcctggtcaattcatgagtgcacttcgactgcgtcactctgcaaagactcatcactccgaagcgggtagttgtctgactacgacttcgttggcgtcgtgctcatcttgtcagcgtgccaccgtcgagttcatgagcggtatggagaagaactgacagtagacgtagccgcaaccggtttgccctggtggggctggatagtgagtacttaagtagttgacttccacagagtcgtgttcaataaattttggagcgttcgcccattgtgatttacaacttgtggtgctgatgaaatatagtttgctagtttgttgtaagataacccaacttcctactccgatgggtataccgacatgctgtagtttgaattgtttgtgccagtaagttattcagttatgtcactggaagtagctactgtattaagagtataagagtattggcgagcgctgctcacaagtcactagcacgatcgagactcctacgccaaagcagaacccaattgacctgttaatgcactgcttcggcgactgctggtctttaggaggcgcagctaaatgacttcgctttactcacgcaatggtaaaagcttcttgcgttaaggatgtgttctaagcttatggtgtaaaaatgcactgcttcgtagctgatcgagcactttgttttcatagagtcttcaaaatttgacgtacggggaagacggatgcatccagtaaatccgcgggcaaagcaagcaagtcgactattgcagcgacagcgacggggaagcctagccattgagtatgtacaatgaggagaagtccaaaccaagtgccccgaaaacggggctgacggccaaagacaccccacaacacgctgcgaatatagtgtacgttgataggtattactgtagcacatgtactatagcaccgagcgctgtcgccttccaactcacatattagaatgtactccaatgcaaactgcgtctcgccccgcgagtaacgcaggaaacatcagggcttatagtacggcaacgatcaagtgcgcgaacccttttggcatgagccccaggactcgacgtaggtcaaagtcaaccagctgcacctccaattgcattcaccctaacttacaccagtttttatttaatctcatagcgcaacttggcaggcagcagatgccagtgagcgtccggtttagcgggtagagaaatccgctgaatgcttctcaattggcggattgttcaatccgacggaatcgaacagcggaactggaggaacacacccttggtttcttgaataaacgctcacactggaccaacttcaatatattccaccaatcagcgtcgaatacacattgaagagctttttagccctttgacctgcaggccgtaccagggatcggaaaataaaaattgatattgtaaaattataatattgttgggcatcaatattgtattgtagcgatgtcatcaatatccactatttattgtcaatattgctcaggaagaaaaactgcccctacttactcttacgatattaaagagcactataagctagttttcctctcctttttccgtggctgttgcctattgaatacttctgacagccttaatagcacttcgctggtcatcagaccccaatccatcgtcagtacttaatcgagtgtcagtttcttcaaataacgctgttgtgctcttctctcttgcgatgccgaatggaaagtgagattacattgaaagctttaactgccaagctacctcagctacagctacagtactagcatctagaacctggtcaagttgatcacaccttcgcgaagcttcgacacttcaacatgcaagttgcccttggtatctgccacacaaatgtgtacaatccatcacctgctaacagctgatgatctgctcgtgacagactggcatctcgtgacatttcacgtttcccgtcagacttgctctcttatcgagctatggttatctccatgagagtagccttgaggtccgcagggctgcacttctgttttctttacagccacgtaatagcaccaacatgtatacgtaataaatttgagtagatactgcgactacgtgcgaaaagacttcgtatgcgtaggaggggggacacttagacctcagagctgcagcgttactgcggtacctacgtcggtgataataacttggcttgtgtccttggcaacagacgtcatgaaatagggagaggtaccccaaccgagtctccaacattgctcgtcgatgcttctgtttggtcactttcgctttagacactaggaagaccgtcaatcatgttcagacacgtacagttaggggtaaagactcgctaaccattggggataagtgccatgacgattcatgctaacattactcaacgtactcatatactctagtacatgtacagtacaatatatcgccatactaaaggcaagtatggcaatatattggggcaaatattgatattggtacaatattgattgtgatgactgcctcgccgacaatcaatatccaatatatattgtccgatccctgaggccgtactactgaccgcaagtgatcgtcgccgttggcgcgcgagacgataagtggatagctcagttacaattcgaaaaagtgtaatgaacctggaggatgttttcacgatgaagcgaccatcggcacgcaatctgacagcagcgaattcaacgcgaagatagcgttctgcaatatttttttagtggtcttgaaccgatagcaataattttggagaccgcgaagcggaagctcagctgacagcgagacggataggatgaaagcaggagtccaggaacagaagagcaccttacaactcgtaaggcgcgttgtaagttacaatgcccacatcggagggtgttgctcagttgctggattccgacatcgaacatggaggggtgtcaagtgacgcaggcgccgcgttgcccagatagccccattgtccgagctcttgggtttgagtagcacagtaattattgatgccccgcatgaccaagcagagcgactccacgcgagcctgcaccagcaccgacgcgtgtagctcatgcgtgaaggccacgccgccgacctccattgtccgcagctagcgttctccctatacactaactatagagtcagctgtacgtgtaaactaggtcgtcttcgacttggctgggaacaccagtggtataaacgctggtgatggtaccggtgctaattgccatgttaaggaagagctgtggcccgcgtgattcaagggcgtggcccctgtggggccacacccatgaatatcgcgcgtgccgcagttcactttctgaagctctgttgacgtgcatttcctgcctcagtctgtagttgccgttcaacctgttcggtcaacatccttctggctggtgtagcacgaaggttgcgccaggttacgcttacgcgtccaattaatccgttgggagctgtccaccccgggtgttcccagtataacagttagttagtgtctagtaaattttgctaacatgtatttgccgaacgagcaccactaatttttgcacaaaaacggaaattactaaagatttttacacttcaataactttatctacgcgctccgatttctatatgttaagagataagacgcttttaattcgatattgtggcccacattgtcccaactcaacggttctatcacattagatgctgccaagtctactcttgatgccagtgcagcgccagagccgtagttagttgaagtgccagtctagatcggatagtcccatccgttaagttgtgttttattttttaaggaccaactcgtgcggacagaactaatagtgaggctagatcctctattagcagcgatggcggtgctgtatttgttgttgaaagcatctacgcacgtaagactgttgatatgcagcgactgtacctgataaaatgggtagggtgggaaagaccgacctggaacctggcccgtcacactccgatcgagatggtcgacgagtttgaagacgcagagctgaattcggcctgacccgaatatatttcgctagaagacgggtctcaagggcgcagagtgtttagatctcttccgtaggtaagaaagacattaactgcaatcagccttaagatatatatcatgattattctcttgctactaactcgtcaactaacagtcagcaaacgtacagctaacagtgagttagtgtctagtaaattccactaacagcaaaacgccctacactatccgcagcttgctccagataaagagccccacgctcgtagaacaagtccaggaacaggtggccgcccgacgggcaggatggatcaagagtctgctgtgacttgactcaagccgcggcacagcggcgacgcgcgtgttcggcgtcatgtgttcctgggcgctggctgtgcttcatcaagaatacagtacaccaggttttccttcaccgccaccgatcctccgatcctccgatcctacgccgttgaatgcatcaaagctgtcttgtggcttgctagtattgccgtttgcagatattttggccaacgcatgcttattatctcgttaataatctctattttagtctagcaagctcttaattaagacctaggtctgatttatatatatcgccagtacaggtctaagatgcaaggttggggtctgtttcaggctttgctacgacttggaaacgcagaaatgccatgctagacgggccaaaccgagtttctgggcctaaaagtggcccccaccaaagcataaagctaaatcagccctcgcctatctcgtgcccactcatattaagagacaggcgtggtctattttagagggcaaagtatttgcaagcggcaatacatgtagcaagttgctaccgactgtattacgaggggtaggtgaagaagagataccagccaatcgggagctggcaacggcggagttatagtcggcgtgttgacgggacctcgcttaagtccgagataattcacactgatgtgggcgccatgaaagaagcttgtcactggtaagacatttgcctttgtacagctcgattggacagtctacagtacatccatgcgagaccagccgctttttaatcgatccgcccgtaaactacggtgacattcactccttcgttgcgacatcaaagctacggcgtacccaaaaggaatgggtcgtgcaaatgcatatcagctcacacttgggtgctcgactgcaaaaaaggcaaatatgcgccttcacggcagtagcgtggtgcgaaagtgtgcccgatcgaggaaagccacaaaaccccttgtcgacggtcggaatctggagagtgtgggtctttctgtgcatcatcgcgcactcgattattccgccgcgtcttcataatcacctgtgcgatcttctgcagttgcattgcagggcgcttggacatgtctactgcctatcacttcagtcggttaccaatgattaggtaaggctgcgcgtcggtcactttgacgccccgaccgagaccaacccaccaggagccatcctcactttccaatttgctccctggacgccactcctcactcagaaagcgaacgtccatccaggagtccaagtattaccatgccgacgtcaccaccggacgcctccggccagcccatgcgcgccaccatcgagtacgacaacggcaagacgctcatggcccaaggaccgcaggcgctgcacgaccacgtctcctcccgcatggagaaggcgctcggccgagccctcccgcagatggaggtgcgcttcaaggacgtgtccatcgccgccgacatcgtcgtcaaggatgagaccgacatcaagacggagctgcccacgctcgccaatgagctcatgaagggcgtccgcggtctgggcgccaagaagcacacggtccgcaagcagatccttcagcacgtcagcggcgtcttcaagcccggaaccatcacgctcgtgctgggtcagccgggatcgggcaagtcctcgctcatgaagctgctcagcggccgcttccccagcgacaagaatgtcacgaacgaaggcgaggtgacttacaacggcacaccagccaacgagctcctccggcgtctaccgcagttcgtgtcgtacgttacgcagcgcgacaagcactacccgtcgctcagtgtcaaggagacgctcgagtttgcgcacgcctgctgcggtggaggcttctccgagcgcgaggcccagcacttggctggtggttcccccgaggagaacaaggccgcgctcgacgccgccagggccatgttcaagcactacccggacatcgtcatccagcagctcggactcgacaactgccagaacaccatcgtgggcgacgccatgacgcgcggcgtgtccggcggagagcgcaagcgcgtgaccacgggcgagatggagttcggcaacaagttcgtcatgatgatggacgagatcagcacgggcctcgacagcgccgccaccttcgacatcattaccacgcagcgcagcatcgccaagaagttccgcaagacggtggtcatctcgctgctgcagccgtcgcccgaggtcttcgagctcttcgacgacgtcgtcatcctgaacgagggccacgtcatgtaccatggtcctcgcgccgaggcgctgggctacttcgagagtctcggcttcaagtgtcctccgcgtcgcgacgtggccgacttcctgctggatctcggcacggacaagcaggcgcagtacgaagtgagctcgatctcctcgagcagtatcccgcgctcggccagccagtacgcggatgtgttcacgcgctcgcgcatttacgcgcggatgatggatgagctgcacggcccgattcccgctaacctgattgaagacaacgagaagcacatgctggccattcctgagttccaccaaaacttctgggacagcacgagagctgtcgttgagcgccagatcacgctcacaatgcgtgacacggcgttcctcgttggccgctccgttatggtgattttgatggggctgctgtactccagtacgttctaccagttcgacgagaccaatgcccagctcgtcatgggtatcatcttcaacgctgttatgttcgtgtcgttgggccaacaagctcagatcccgacattcatcgcagctcgagacgtattctacaagcagcggcgcgccaacttcttccgtacaacctcattcgtgctatcgaactcgatcagtctgctgccgttgggactggcggagagtctggtgttcggctcgatcgtgtactggatgtgcggctacttggcgacggtggaagcgttcctgctgttcgagctcatgttgttcatgacgaatctggccatgtctgcgtggttcttcttcctctcctgtgcgtcgcccgacctgaacgtggccaaccccatctccatggtctccatcctcttcttcgttctctttgccgggttcacgatcaccaaggaccagattccggactacctcgtttggatctattggattaatccgatggcgtggggtgtgcgcgcgcttgccgtgaaccagtacaccgactcgagcttcgacacgtgcgtgtacaacgacgttgactactgcgcctcctacaacatgaccatgggcgagtactcgctcagcacgttcgaggtgccggctgaaaagttctggctctggtacggcatggtgttcatggctgctgcgtacgtcttcttcatgttcctctcgtacattgcgctggagttccaccgacacgaaagtcccgagaatgtgacgcttgacaccgacagcaaggacgaagtaacgagcgactatggcctcgtccagacgccccgaagcactgccaaccccggcgagacaacgctttcagtcacccccgatagcgagaagcacttcatcccggtcaccgtcgccttcaaggacctgtggtactccgtgccggacccggccaaccccaaggacaccatcgacctgctcaagggcatcagcggatacgcgctgcccggcaccatcacggcgctcatggggtcctcgggcgcaggcaagaccacgctcatggacgtcatcgccggccgcaagacgggaggcaagatccgcggccagatcctgctcaacggccacccggccaccgacctggccatccgccggtccacgggctactgcgagcagatggacatccactcggagtcgtcgacgatccgcgaggcgctcacgttcagcgcgttcctgcgccagggcgccgacgtgcccgacagctacaagtacgactcggtgaacgagtgcctggacctgctggacctgcacccgatcgccgaccagatcatccgcggcagctccgtggagcagatgaagcgcctgaccatcggcgtggagctggcggcgcagcccagcgtgctgttcctggacgagcccacgagcggcctggacgcgcgcagtgccaagctcatcatggacggcgtgcgcaaggtggccaacacgggccgcaccgtcgtgtgcacgatccaccagccgtcctcggaggtgttcagcgtgttcgacagcctgctgctgctcaaacgcggcggcgagacggtgttcgccggcgagctgggcaagaacgcgagcgagatgatcgcgtacttcgagtccatcgacggcgtggccaagctcgaggacaactacaacccggcgacgtggatgctggaggtgatcggcgccggcgtgggcaacagcaacggcgacaagacggacttcgtccagatcttccagcagagcaagcacttccagttcctgcagtcaaacttggaccgcgagggtgtgtctcggccgtcgccgtcgcttccagcactggagtacagcgacaagcgtgccgcgacggagctgacccagatgaagttcttgatgcagcgcttcttcaacatgtactggcgcacggcgtcgtacaacttgacgcgctttagcctcgcgttgatcctgggcgtcgtttttggcatcacttacgcaagcgcggagtacagttcgtacgccggcatcaactcgggtatgggcatgctgttctgcgcgactggattcatcggcttcatcgcgttcacgagcgtcatcccaatcgcgacagaagaccgactggcgttctacagggagcgcgctagccagacctataatgcgctctggtacttcgtgggctccaccgtcgtcgagatcccgtacgttttcttcagcacgctgctgctcatggcgccgtactacccgctggtcggcttcacgggcgtcaagaccttcttcgcttactggctgcacctctcgatgcacgtgctgtggcaggcgtacttcggccagctcatgtcgtacttgatgccgacggtggaggtggcttcgatcttcggcgtgctcttgcaaatgatcttcttcctcttcaacggcttcaacccgcctggaagcgccatcccgacgggctacaagtggctctaccacattactccccacaagtactcgctggcgttggttgcatcactcgtattcggcgactgccccagtgatggcgatgggtcggagattggatgccaggtcatgacgggtgtgccgccctcccttcccgaggatatgacggtgaaggagtacatggaggacgtcttcctcatgaagcacagtgagatctacaagaacttcggcttcgtcttgggcttcatcgtgctcttccgtttcttgggtctgcttgctctgcgcttcgtcaaccaccagaagaagtaacccgtttcgtagtcacgataagaccaatatatcttcttgcacttcaagcaagtttttgtactgcgcaccatggtagtaattcttcgtctggtgagcaagaaaaatagttcacagcttgttgaccttctgtatggtggtcggagccacaagactccatgccagccatttgtacaccatggcagctgcaggatgttgttagcccatgtacttgtcgaaattgccacaatacattttccagcagcctgcacgcagtcgtcacaccgcaatagatttcggtccttgtgcgttgctcgtcatcagctattgtgttacggccacgatttcaatgccaagcgaaaatatagcccttgttgaccaagttgatagcgatggacaagcaagcacaggcaaaatgcatgtggatcataatcgtgagggaacgtcaacgtccacagttcatgtaccaagatgaacgacaccttgtcgtcgactctagactccattgactcaagtccaggcccagccagctccatacaaatccacgatccaagtctcccaaccgccatgaatcgtacttaaacggagctccaccatcagctgtgaggcgccattagcgactcacacaaccctcgtaatcccagacagcaccaagtgccgccacgttattgtcaattcccgcaaactccagtgtgtttgccaccgccagcgagacatcatcacgttccgtccgtccccacttgtttgatagctcacttcccaatttgccgcttccgagcgacaactccagcaacttccaggtgcctcaacgcagtcttcagtctgtgcacgttcacatttctcggaccacaggttagggcgcgatcaaaacaatgggcgacgcgcacgatgacacgtcggacgcgcccatgagagccgccatcgagtacgacaacggcaagaccctcatggcccgcggaccccaggcgctgcacgaccacgtcgcctcccgaatggagaaggcgctcggcaagaacctcccgcagatggaggtgcgcttcaaggacgtctccatctccgccgacgtcattgtcaaggatgagagcaacgtcaagaccgagctccccaccttggtcaacgtcctcaagtcgagcatccaggagatgcgctccagcaaacacgtcgtcaagaagcaggtgctcaagaacgtcagcggcgtctttaagcccggcactatcacgctcgtgctgggccagccgggatcgggcaagtcctcgttcatgaagctgctcagcggccgcttccccaacgacaagaacgtcaccgttgaaggcgaactgacgtacaacgggatcgcttccaacaagctgaccaaacagctccctcagtttgtatcgtatgtcaaccagcgagacaagcactacccgtcgctcagtgtcaaggagacgctcgagtttgcgcacgcctgctgcggtggaggcttctccgagcgcgaggcccagcacttggctggtggttcccccgaggagaacaaggccgcgctcgacgccgccagggccatgttcaagcactacccggacatcgtcatccagcagctcggactcgacaactgccagaacaccatcgtgggcgacgccatgacgcgcggcgtgtccggcggagagcgcaagcgcgtgaccacgggcgagatggagttcggcaacaagttcgtcatgatgatggacgagatcagcacgggcctcgacagcgccgccaccttcgacatcattaccacgcagcgcagcatcgccaagaagttccgcaagacggtggtcatctcgctgctgcagccgtcgcccgaggtcttcgagctcttcgacgacgtcgtcatcctgaacgagggccacgtcatgtaccatggtcctcgcgccgaggcgctgggctacttcgagagtctcggcttcaagtgtcctccgcgtcgcgacgtggccgacttcctgctggatctcggcacggacaagcaggcgcagtacgaagtgagctcgatctcctcgagcagtatcccgcgctcggccagccagtacgcggatgtgttcacgcgcttgcgcatctacgggcagatgatggacgagctacacggcccgatttccgccagcctgattgaggacaatgaaaagcacatgctggccattcctgagttccaccttggcttcgtggaaagcacgattgacgttgttcgtcgtcaactgacgctgctgcgatacagcatttctgatcggacggaccgttatggtgatcttgatgggtctgctgtatgcaagcacgttctaccagtttgacaaaaccaattctcagctggttatgggcatcatcttcaacgctgtcatgttcgtgtcgctcggccagcaagctcagatcccaatgtttatggcggcccgcgaggtgttctacaagcagcgtcgtgccaacttcttccgtaccgcatcgttcgtgttgtcgaattcagtgagtcaagttccggtggctgcgatcgagagtctggtcttcgggtcgatcatctactggatgtgcggttacgtctccaccattagcgcgtatctcatcttcgagctgatgctgttcgtcacaaacctcgccttcacggcctggttcttcttcctgtcgtgtgagtcacctgacctgaacgtggccaacccgatctccatggtttcggtcttactgttcgtcctctttgccgggttcacgatcacgaaagaccagattccggactatttcatttggttgtattggctcaacccgatgtcctgggacgttcgcgcgcttgctgtgaaccagtactccgactccaagttcgacacgtgcgtgtttgacggtgtcgactactgcgccacattcaacatgaccatgggtgagtactcgctcagcacgttcgaggtgccgaccgagaagttctggctctggtacggcatcgtgttcatggctgccgcgtacgtcttcttcatgttcctctcgtacatcgcgctggagttccaccgctacgagagccccgaaaacgtgacgctggactcggagaacaagggcgatgcgtccgatagctacggcttgatggccacccctcgtggctcgtcgaccgagcccgaggctgtactgaacgttgccgccgacagcgagaagcacttcatcccggtcaccgtcgccttcaaggacctgtggtactccgtgccggacccggccaaccccaaggacaccatcgacctgctcaagggcatcagcggatacgcgctgcccggcaccatcacggcgctcatggggtcctcgggcgcaggcaagaccacgctcatggacgtcatcgccggccgcaagacgggaggcaagatccgcggccagatcctgctcaacggccacccggccaccgacctggccatccgccggtccacgggctactgcgagcagatggacatccactcggagtcgtcgacgatccgcgaggcgctcacgttcagcgcgttcctgcgccagggcgccgacgtgcccgacagctacaagtacgactcggtgaacgagtgcctggacctgctggacctgcacccgatcgccgaccagatcatccgcggcagctccgtggagcagatgaagcgcctgaccatcggcgtggagctggcggcgcagcccagcgtgctgttcctggacgagcccacgagcggcctggacgcgcgcagtgccaagctcatcatggacggcgtgcgcaaggtggccaacacgggccgcaccgtcgtgtgcacgatccaccagccgtcctcggaggtgttcagcgtgttcgacagcctgctgctgctcaaacgcggcggcgagacggtgttcgccggcgagctgggcaagaacgcgagcgagatgatcgcgtacttcgagtccatcgacggcgtggccaagctcgaggacaactacaacccggcgacgtggatgctggaggtgatcggcgccggcgtgggcaacagcaacggcgacaagacggacttcgtccagatcttccagcagagcaagcacttccagttcctgcagtcaaacttggaccgcgagggtgtgtctcggccgtcgccgtcgcttccagcactggagtacagcgacaagcgtgccgcgacggagctgacccagatgaagttcttgatgcagcgcttcttcaacatgtactggcgtacggcgtcgtacaacttgacgcgcttcgcccttgctctggttcttggtgtccacatcggcgtcacctacgtcagcgctgagtactcgtcgtactcgggcatcaactcgggcatgggtatgctcttctgcacgaccggattcgtcggcttcatcgcgttcacaagtgtgatgcccattgcgtcggaggaccgcctggcattctacagggagcgcgctagccagacctataatgcgctctggtacttcgtgggctccaccgtcgtcgagatcccgtacgtcttcttcagcacgctgctcttcatggcgccgtactacccgatggtgggattcacgggtgtcaagagcttcctcgcgtactggctgcacctgtccctgcacgtgctgtggcaggcgtacttcggccagctcatgtcgtacttgatgccgacggtggaggtggcgcaggtgttcggcatcttgctgtcgtccatcttcttcctgttcaacggcttcaacccgccgggcagctccatcccccagggctacaagtggctctaccacgtgtcgccgcagaagtactcgctggcgctggtctcggccatcgcgttcggcgactgcccgagcgacggcgacgggtccgagatcgggtgccaggtcatgacgggggtgccgccctcgctgcccgagaacctgacggtcaaggactacctggaggacgtcttcctcatgaagcacagcgagatctggaagaacttcgccttcgtcttgggcttcatcgtggtcacgcgcctgctcgcgctggtcgccctgcgcttcgtcaaccaccagaagaagtagccgagacctcagctctgctctgtgtacatacatatccctgaataaaacgccattgctcttgcacatgaacgcgctcgtcatcacatcacatcacggcttcggcggcggaagcgctgctgctgcgatcagctccgagcggcagcactccgggttaagttctcagctcgccagtcttcaaatagagactggctcggaaagatttaaaacccggggtgatttggtgcttcagccaaaaagacccagaggataaattgaaatgatcggacaaacatctttgacagggggttgcttcgcacgacacaacttgagcccaggacagaactgcaaactgactgccgacagaagacggccgatgctgccctgctgccggtgcagccgccaacgctgctgtagctgctctcagtaatgtcaccgatgattctgccagtgttgttgctgagacagcttctccacggaggagatgcagccaggtgagtactacgacgagttcactctagataaaaaaatcttccagctaagagaatttggtgaccgagtatgcgtgttccagcgctaagagataaagacggaatgtagtgtaggatatatttcaagttttgtgtaagtacggtgtctacttgctgtccagcggccgcggacacttaccgcttctggtggttcacgaagcgcatggccaggagcgtcagcacgcggaagaaggccacgaaggccagcacgatggcgcagttctgccagacctcgctgtgcttcatcaggaacacgtcctccaggtactccttcaccgtcaggttcgccggcagcgagggcggcacgttcgtcatgtgcttgcagccgacgtcgctgccgtcgccgccgctggggcagtcgccgaacacgacggtcgacatggccgcgagcgtgtacttctgcggcgtgatgtggtacagccacttgtagcccgtcggcaggtctccggccggaggactgaagcccatgaagagcaggaagatgagcgacatgagcatgcccaggatctgcgccacctcgacgttcggcagcaggaagaccaggaactcgccgatgtacgcctgcagcagcacgtgcagcgacacggtcagccagaccgtgaggaacgacccgaagcccgtgaagcccactatggggtagaagatcgccatgaacagcagcgtcgcgccgaaggtgtacgggatctcggccacgctcgagcccacgaagtaccagagcgcattgtagctctgcccagcgcgctcgcggtagaacacggctcgctcctgcgacgcgatggggagagcgctgttgaacgagccgatgccgaggaacccgacagccaagtacagcatgcccatgcccgagttgatgcccgagtacgacgagtactcggcgccgacgtacgtgatgccgaagagaagccccagcaccaacgacacgaagaagcgtgtcaggttgaacgacgccgtacgccagtacatgttgaagaagcgctgcatcaagaacttcatctgggtcagctccgtcgcggcacgcttgtcgctgtactccagtgctggaagcgacggcgacggccgagacacaccctcgcggtccaagtttgactgcaggaactggaagtgcttgctctgctggaagatctggacgaagtccgtcttgtcgccgttgctgttgcccacgccggcgccgatcacctccagcatccacgtcgccgggttgtagttgtcctcgagcttggccacgccgtcgatggactcgaagtacgcgatcatctcgctcgcgttcttgcccagctcgccggcgaacaccgtctcgccgccgcgtttgagcagcagcaggctgtcgaacacgctgaacacctccgaggacggctggtggatcgtgcacacgacggtgcggcccgtgttggccaccttgcgcacgccgtccatgatgagcttggcactgcgcgcgtccaggccgctcgtgggctcgtccaggaacagcacgctgggctgcgccgccagctccacgccgatggtcaggcgcttcatctgctccacggagctgccgcggatgatctggtcggcgatcgggtgcaggtccagcaggtccaggcactcgttcaccgagtcgtacttgtagctgtcgggcacgtcggcgccctggcgcaggaacgcgctgaacgtgagcgcctcgcggatcgtcgacgactccgagtggatgtccatctgctcgcagtagcccgtggaccggcggatggccaggtcggtggccgggtggccgttgagcaggatctggccgcggatcttgcctcccgtcttgcggccggcgatgacgtccatgagcgtggtcttgcctgcgcccgaggaccccatgagcgccgtgatggtgccgggcagcgcgtatccgctgatgcccttgagcaggtcgatggtgtccttggggttggccgggtccggcacggagtaccacaggtccttgaaggcgacggtgaccgggatgaagtgcttctcgctgtcggcggcaacgttcagtacagcctcgggctcggtcgacgagccacgaggggtggccatcaagccgtagctatcggacgcatcgcccttgttctccgagtccagcgtcacgttttcggggctctcgtagcggtggaactccagcgcgatgtacgagaggaacatgaagaagacgtacgcggcagccatgaacacgatgccgtaccagagccagaacttctcggtcggcacctcgaacatggtgagcgaatagtctccgaccgtctggttgaagctctcgcagaagtcgacgtcgccgtagacgcacgtgtcgaagctcgagtcgctgtactggttcacagccagagcgcgcacgccccaagcgaccgggttcagccagtacaaccaaatcaggtagtccggaatctggtccttggtgatcacgaagcccccgaacaagatgaagaagaggatcgagacgctggagatcgggttggccacgttgaaattcggcgacgccgacgccaggaagaagaaaaacgccgtgaacgcgaggttcgtgacgcacagcatgacgaggaacagcaggaacgccccgatggtgtccacgaagccgcacatccagtagaccacggagccgaacaccacggtctccaagataatcggaggtagctgactggccgagttcgagagcacgtaggacgacgtccgaaagaagttggccccgcgctgcttgtagaacacctcgcgcgcagccatgatcgtcgggatctccgcggagtggcccagcgacaagcacagaaccgacgcgaaaatgacgcccatgaccagctgcgagttcgtcgggttgaactggtagaagacgctcgcgtacagcaggcccatgatggtgttcatgaacaagcgccccatgagcgctgccgagtcgcgcattgtcaccctcatctgtcgcttcacgagcaacgcggtgctgtcccagaagttcaggtggaactcgggctgggtgtccatgtgcgtctccttgtcgaggacgagcccggggtacacggggtcttcgaggtctgccagcacttgttggtagatggacgagcgctcgaacgcgttggcaaagtcgcttgaagtgcacgggatggtgcgtccttgggctttaacttcgtactgcgcctgcttgtccgtgccgagatccagcaggaagtcggccacgtcgcgacgcggaggacacttgaagccgagactctcgaagtagcccagcgcctcggcgcgaggaccatggtacatgacgtggccctcgttcaggatgacgacgtcgtcgaagagctcgaagacctcgggcgacggctgcagcagcgagatgaccaccgtcttgcggaacttcttggcgatgctgcgctgcgtggtaatgatgtcgaaggtggcggcgctgtcgaggcccgtgctgatctcgtccatcatcatgacgaacttgttgccgaactccatctcgcccgtggtcacgcgcttgcgctctccgccggacacgccgcgcgtcatggcgtcgcccacgatggtgttctggcagttgtcgagtccgagctgctggatgacgatgtccgggtagtgcttgaacatggccctggcggcgtcgagcgcggccttgttctcctcgggcgtgccgttggtgaagtgctgctcgtcccgcttcgacaggccgcctccggtgcaggcgtgcgcgaactcgagcgtctccttgacggtgagcagcgagtagtgccggtcgcgctgcgtcacgtacgacacgaactggggcaagtgcttctgcatgtcggtggcgggcgtgccgttgtaggtcacctggccctccatcgtgacgttcttgtcgttggggaagcggctgctgagcagcttcatgaacgaggacttgcccgatcccggctggcccagcacgagcgtgatagtgccgggcttaaagacgccgctgacgttcttgagcacctgcttcttgacgacgtgtttgctggagcgcatctcgcggaaacctgtcttcatgacgttgatcagcgtggggagctcgaccttgacgtcggtctcgtccttgacgatgatgtcggcggagatggagacgtccttgaagcgcacctccatctgcgggaggctcttgccgagcgccttctccatgcgggaggcgacgtggtcgtgcagcgcctgcggtccctgcgccatgagcgtcttgccgttgtcgtactcgatggtggcgcgcatgggcgcgtccgagtcctgcatgtctgcgagtctgatatcctgtcgcgctcgcttggcttcggagctgagctggtgtcgctagtaggactcaaattgcaaagtggtgtacagatgtgcaccgatcgattgggtgggggatcgctgtgaaacgagcgcgacgtcgcaaccggtggagcctgggtgatcgctggaacttgcccataccaagcattttgtttacgactgtggcacgtgaccaatcagagggccgctttagattatgggacgggaatcaacgaccaacactccggtcatgttgattcccagtccgccagtcgcggacataaggcggccccagtagtggtggtggtggtgtgtgccgtgtgttgtgtgcaatgcattggcgcccaaacggggccatcaataaggcaaacagcagcatcgaagtgagccggatcgctcttcgtcggaggccagaacggaatcaccaaaatggcggcgagtacagtattaggtcgtccgagttccttgcgggcagtgactgtatgttggagctcgtctcgtgtcgcggtgcctcttctcgggtctgctggacaataatcttgtccatcgtgtcaagacaaataaataaactcgctccttgtgttatggtgcgcggatttcgtcgttctcgtttcgctacatgtagtgcacggagttgtcgtagtcctcctgcttgatagaacgcagcaacactgctatcgtgagtgtgctgccttgatgcacgactcgatttctctggagccacaataccgtcaaattcgagccccaccccggttggaacgagctattcgcactctcatccgaatgtactgtattattgggggcaagtgcatttgtgagaacgtgagcttgagcaatgcagaactgcaagtaacttcaactcaaatactttcgtacgactgcgtgtgtgttcctcaggcgggaccttcacttcagcggatttgagatacggtacgttttggcggattacacaatccgctgttgtgttttgagaggcacaagaggcacctttttggctgtaatcctctcgaatttgccttctcattggcgccgccaacttggcgggttgacgagaagcacctgcaaggctacatatttatcgttgctgaggaacctcagtaagtagtcaaagtttcctgtatcgttgtaggctgtgttttagttcgactgtcccgatgaacaatccgcaaaatgaaatgcggattcatctattcgctaacaggacgaggaacacgtcctccggtatccgcccgtcaacttgcactctgcgtgagaatgcatttatttaagtaaatggacgtgcatatggcgtaggggtgtatctaataagacgttcagttggtagtctttacctacgtcaaggcctgggactcttgccaaaatgcttcgcgcacttggatcattgccgcactatagtactcaccgtcgccttacaccatactcacagcgtgttgtgtcgtgtctccaccctcatttgtcgggggtctctcctccccgttgtacttactgaatggtctggctttcccttcgttgtcgcagcagtggtggtcttgcttgctttgcccgtgcgtttgcccgatgtatgtacttcctgtacctactgcaaagtgcccaaccaaccacgtgaaatctgaggttcctcagcaacgataaatatgtagccttgcaggtgcttctcgtcaacccgccaagttggcggcgccaatgagaaggcaaattcgagaggattacagccaaaaaggtgcctcttgtgcctctcaaaacacaacagcggattgtgtaatccgccaaaacgtaccgtatctcaaatccgctgaagtgaaggtcccgcctgaggaacacacacgcagtcgtacgaaagtatttgagttgaagttacttgcagttctgcattgctcaagctcacgttctcacaaatgcacttgcccccaataatacagtacattcggatgagagtgcgaatagctcgttccaaccggggtggggctcgaatttgacggtattgtggctccagagaaatcgagtcgtgcatcaaggcagcacactcacgatagcagtgttgctgcgttctatcaagcaggaggactacgacaactccgtgcactacatgtagcgaaacgagaacgacgaaatccgcgcaccataacacaaggagcgagtttatttatttgtcttgacacgatggacaagattattgtccagcagacccgagaagaggcaccgcgacacgagacgagctccaacatacagtcactgcccgcaaggaactcggacgacctaatactgtactcgccgccattttggtgattccgttctggcctccgacgaagagcgatccggctcacttcgatgctgctgtttgccttattaatggccccgtttgggcgccaatgcattgcacacaacacacggcacacaccaccaccaccactactggggccgccttatgtccgcgactggcggactgggaatcaacatgaccggagtgttggtcgttgattcccgtcccataatctaaagcggccctctgattggtcacgtgccacagtcgtaaacaaaatgcttggtatgggcaagttccagcgatcacccaggctccaccggttgcgacgtcgcgctcgtttcacagcgatcccccacccaatcgatcggtgcacatctgtacaccactttgcaatttgagtcctactagcgacaccagctcagctccgaagccaagcgagcgcgacaggatatcagactcgcagacatgcaggactcggacgcgcccatgcgcgccaccatcgagtacgacaacggcaagacgctcatggcgcagggaccgcaggcgctgcacgaccacgtcgcctcccgcatggagaaggcgctcggcaagagcctcccgcagatggaggtgcgcttcaaggacgtctccatctccgccgacatcatcgtcaaggacgagaccgacgtcaaggtcgagctccccacgctgatcaacgtcatgaagacaggtttccgcgagatgcgctccagcaaacacgtcgtcaagaagcaggtgctcaagaacgtcagcggcgtctttaagcccggcactatcacgctcgtgctgggccagccgggatcgggcaagtcctcgttcatgaagctgctcagcggccgcttccccaacgacaagaacgtcacgatggagggccaggtgacctacaacggcacgcccgccaccgacatgcagaagcacttgccccagttcgtgtcgtacgtgacgcagcgcgacgggcactactcgctgctcaccgtcaaggagacgctcgagttcgcgcacgcctgcaccggaggcggcctgtcgaagcgggacgagcagcacttcaccaacggcacgcccgaggagaacaaggccgcgctcgacgccgccagggccatgttcaagcactacccggacatcgtcatccagcagctcggactcgacaactgccagaacaccatcgtgggcgacgccatgacgcgcggcgtgtccggcggagagcgcaagcgcgtgaccacgggcgagatggagttcggcaacaagttcgtcatgatgatggacgagatcagcacgggcctcgacagcgccgccaccttcgacatcattaccacgcagcgcagcatcgccaagaagttccgcaagacggtggtcatctcgctgctgcagccgtcgcccgaggtcttcgagctcttcgacgacgtcgtcatcctgaacgagggccacgtcatgtaccatggtcctcgcgccgaggcgctgggctacttcgagagtctcggcttcaagtgtcctccgcgtcgcgacgtggccgacttcctgctggatctcggcacggacaagcaggcgcagtacgaagttaaagcccaaggacgcaccatcccgtgcacttcaagcgactttgccaacgcgttcgagcgctcgtccatctaccaacaagtgctggcagacctcgaagaccccgtgtaccccgggctcgtcctcgacaaggagacgcacatgaacacccagcccgagttccacctgaacttctgggacagcaccgcgttgctcgtgaagcgacagatgagggtgacaatgcgcgactcggcagcgctcatggggcgcttgttcatgaacaccatcatgggcctgctgtacgcgagcgtcttctaccagttcaacccgacgaactcgcagctggtcatgggcgtcattttcgcgtcggttctgtgcttgtcgctgggccactccgcggagatcccgacgatcatggctgcgcgcgaggtgttctacaagcagcgcggggccaacttctttcggacgtcgtcctacgtgctctcgaactcggccagtcagctacctccgattatcttggagaccgtggtgttcggctccgtggtctactggatgtgcggcttcgtggacaccatcggggcgttcctgctgttcctcgtcatgctgtgcgtcacgaacctcgcgttcacggcgtttttcttcttcctggcgtcggcgtcgccgaatttcaacgtggccaacccgatctccagcgtctcgatcctcttcttcatcttgttcgggggcttcgtgatcaccaaggaccagattccggactacctgatttggttgtactggctgaacccggtcgcttggggcgtgcgcgctctggctgtgaaccagtacagcgactcgagcttcgacacgtgcgtctacggcgacgtcgacttctgcgagagcttcaaccagacggtcggagactattcgctcaccatgttcgaggtgccgaccgagaagttctggctctggtacggcatcgtgttcatggctgccgcgtacgtcttcttcatgttcctctcgtacatcgcgctggagttccaccgctacgagagccccgaaaacgtgacgctggactcggagaacaagggcgatgcgtccgatagctacggcttgatggccacccctcgtggctcgtcgaccgagcccgaggctgtactgaacgttgccgccgacagcgagaagcacttcatcccggtcaccgtcgccttcaaggacctgtggtactccgtgccggacccggccaaccccaaggacaccatcgacctgctcaagggcatcagcggatacgcgctgcccggcaccatcacggcgctcatggggtcctcgggcgcaggcaagaccacgctcatggacgtcatcgccggccgcaagacgggaggcaagatccgcggccagatcctgctcaacggccacccggccaccgacctggccatccgccggtccacgggctactgcgagcagatggacatccnnnnnnnnnnnnnnnnnnnnnnnnnnnnnnnnnnnnnnnnnnnnnnnnnnnnnnnnnnnnnnnnnnnnnnnnnnnnnnnnnnnnnnnnnnnnnnnnnnnngaagaggatcgagacgctggagatcgggttggccacgttgaaattcggcgacgccgacgccaggaagaagaaaaacgccgtgaacgcgaggttcgtgacgcacagcatgacgaggaacagcaggaacgccccgatggtgtccacgaagccgcacatccagtagaccacggagccgaacaccacggtctccaagataatcggaggtagctgactggccgagttcgagagcacgtaggacgacgtccgaaagaagttggccccgcgctgcttgtagaacacctcgcgcgcagccatgatcgtcgggatctccgcggagtggcccagcgacaagcacagaaccgacgcgaaaatgacgcccatgaccagctgcgagttcgtcgggttgaactggtagaagacgctcgcgtacagcaggcccatgatggtgttcatgaacaagcgccccatgagcgctgccgagtcgcgcattgtcaccctcatctgtcgcttcacgagcaacgcggtgctgtcccagaagttcaggtggaactcgggctgggtgttcatgtgcgtctccttgtcgaggacgagcccggggtacacggggtcttcgaggtctgccagcacttgttggtagatggacgagcgctcgaacgcgttggcaaagtcgcttgaagtgcacgggatggtgcgtccttgggctttaacttcgtactgcgcctgcttgtccgtgccgagatccagcaggaagtcggccacgtcgcgacgcggaggacacttgaagccgagactctcgaagtagcccagcgcctcggcgcgaggaccatggtacatgacgtggccctcgttcaggatgacgacgtcgtcgaagagctcgaagacctcgggcgacggctgcagcagcgagatgaccaccgtcttgcggaacttcttggcgatgctgcgctgcgtggtaatgatgtcgaaggtggcggcgctgtcgaggcccgtgctgatctcgtccatcatcatgacgaacttgttgccgaactccatctcgcccgtggtcacgcgcttgcgctctccgccggacacgccgcgcgtcatggcgtcgcccacgatggtgttctggcagttgtcgagtccgagctgctggatgacgatgtccgggtagtgcttgaacatggccctggcggcgtcgagcgcggccttgttctcctcgggcgtgccgttggtgaagtgctgctcgtcccgcttcgacaggccgcctccggtgcaggcgtgcgcgaactcgagcgtctccttgacggtgagcagcgagtagtgcccgtcgcgctgcgtcacgtacgacacgaactggggcaagtgcttctgcatgtcggtggcgggcgtgccgttgtaggtcacctggccctccatcgtgacgttcttgtcgttggggaagcggccgctgagcagcttcatgaacgaggacttgcccgatcccggctggcccagcacgagcgtgatagtgccgggcttaaagacgccgctgacgttcttgagcacctgcttcttgacgacgtgtttgctggagcgcatctcgcggaaacctgtcttcatgacgttgatcagcgtggggagctcgaccttgacgtcggtctcgtccttgacgatgatgtcggcggagatggagacgtccttgaagcgcacctccatctgcgggaggctcttgccgagcgccttctccatgcgggaggcgacgtggtcgtgcagcgcctgcggtccctgcgccatgagcgtcttgccgttgtcgtactcgatggtggcgcgcatgggcgcgtccgagtcctgcatgtctgcgagtctgatatcctgtcgcgctcgcttggcttcggagctgagctggtgtcgctagtaggactcaaattgcaaagtggtgtacagatgtgcaccgatcgattgggtgggggatcgctgtgaaacgagcgcgacgtcgcaaccggtggagcctgggtgatcgctggaacttgcccataccaagcattttgtttacgactgtggcacgtgaccaatcagagggccgctttagattatgggacgggaatcaacgaccaacactccggtcatgttgattcccagtccgccagtcgcggacataaggcggccccagtagtggtggtggtggtgtgtgccgtgtgttgtgtgcaatgcattggcgcccaaacggggccattaataaggcaaacagcagcatcgaagtgagccggatcgctcttcgtcggaggccagaacggaatcaccaaaatggcggcgagtacagtattaggtcgtccgagttccttgcgggcagtgactgtatgttggagctcgtctcgtgtcgcggtgcctcttctcgggtctgctggacaataatcttgtccatcgtgtcaagacaaataaataaactcgctccttgtgttatggtgcgcggatttcgtcgttctcgtttcgctacatgtagtgcacggagttgtcgtagtcctcctgcttgatagaacgcagcaacactgctatcgtgagtgtgctgccttgatgcacgactcgatttctctggagccacaataccgtcaaattcgagccccaccccggttggaacgagctattcgcactctcatccgaatgtactgtattattgggggcaagtgcatttgtgagaacgtgagcttgagcaatgcagaactgcaagtaacttcaactcaaatactttcgtacgactgcgtgtgtgttcctcaggcgggaccttcacttcagcggatttgagatacggtacgttttggcggattacacaatccgctgttgtgttttgagaggcacaagaggcacctttttggctgtaatcctctcgaatttgccttctcattggcgccgccaacttggcgggttgacgagaagcacctgcaaggctacatatttatcgttgctgaggaacctcagatttcacgtggttggttgggcactttgcagtaggtacaggaagtacatacatcgggcaaacgcacgggcaaagcaagcaagaccaccactgctgcgacaacgaagggaaagccagaccattcagtaagtacaacggggaggagagacccccgacaaatgagggtggagacacgacacaacacgctgtgagtatggtgtaaggcgacggtgagtactatagtgcggcaatgatccaagtgcgcgaagcattttggcaagagtcccaggccttgacgtaggtaaagactaccaactgaacgtcttattagatacacccctacgccatatgcacgtccatttacttaaataaatgcattctcacgcagagtgcaagttgacgggcggataccggaggacgtgttcctcgtcctgttagcgaatagatgaatccgcatttcattttgcggattgttcatcgggacagtcgaactaaaacacagcctacaacgatacaggaaactttgactacttactgaggttcctcagcaacgataaatatgtagccttgcaggtgcttctcgtcaacccgccaagttggcggcgccaatgagaaggcaaattcgagaggattacagccaaaaaggtgcctcttgtgcctctcaaaacacaacagcggattgtgtaatccgccaaaacgtaccgtatctcaaatccgctgaagtgaaggtcccgcctgaggaacacacacgcagtcgtacgaaagtatttgagttgaagttacttgcagttctgcattgctcaagctcacgttctcacaaatgcacttgcccccaataatacagtacattcggatgagagtgcgaatagctcgttccaaccggggtggggctcgaatttgacggtattgtggctccagagaaatcgagtcgtgcatcaaggcagcacactcacgatagcagtgttgctgcgttctatcaagcaggaggactacgacaactccgtgcactacatgtagcgaaacgagaacgacgaaatccgcgcaccataacacaaggagcgagtttatttatttgtcttgacacgatggacaagattattgtccagcagacccgagaagaggcaccgcgacacgagacgagctccaacatacagtcactgcccgcaaggaactcggacgacctaatactgtactcgccgccattttggtgattccgttctggcctccgacgaagagcgatccggctcacttcgatgctgctgtttgccttattgatggccccgtttgggcgccaatgcattgcacacaacacacggcacacaccaccaccaccactactggggccgccttatgtccgcgactggcggactgggaatcaacatgaccggagtgttggtcgttgattcccgtcccataatctaaagcggccctctgattggtcacgtgccacagtcgtaaacaaaatgcttggtatgggcaagttccagcgatcacccaggctccaccggttgcgacgtcgcgctcgtttcacagcgatcccccacccaatcgatcggtgcacatctgtacaccactttgcaatttgagtcctactagcgacaccagctcagctccgaagccaagcgagcgcgacaggatatcagactcgcagacatgcaggactcggacgcgcccatgcgcgccaccatcgagtacgacaacggcaagacgctcatggcgcagggaccgcaggcgctgcacgaccacgtcgcctcccgcatggagaaggcgctcggcaagagcctcccgcagatggaggtgcgcttcaaggacgtctccatctccgccgacatcatcgtcaaggacgagaccgacgtcaaggtcgagctccccacgctgatcaacgtcatgaagacaggtttccgcgagatgcgctccagcaaacacgtcgtcaagaagcaggtgctcaagaacgtcagcggcgtctttaagcccggcactatcacgctcgtgctgggccagccgggatcgggcaagtcctcgttcatgaagctgctcagcagccgcttccccaacgacaagaacgtcacgatggagggccaggtgacctacaacggcacgcccgccaccgacatgcagaagcacttgccccagttcgtgtcgtacgtgacgcagcgcgaccggcactactcgctgctcaccgtcaaggagacgctcgagttcgcgcacgcctgcaccggaggcggcctgtcgaagcgggacgagcagcacttcaccaacggcacgcccgaggagaacaaggccgcgctcgacgccgccagggccatgttcaagcactacccggacatcgtcatccagcagctcggactcgacaactgccagaacaccatcgtgggcgacgccatgacgcgcggcgtgtccggcggagagcgcaagcgcgtgaccacgggcgagatggagttcggcaacaagttcgtcatgatgatggacgagatcagcacgggcctcgacagcgccgccaccttcgacatcattaccacgcagcgcagcatcgccaagaagttccgcaagacggtggtcatctcgctgctgcagccgtcgcccgaggtcttcgagctcttcgacgacgtcgtcatcctgaacgagggccacgtcatgtaccatggtcctcgcgccgaggcgctgggctacttcgagagtctcggcttcaagtgtcctccgcgtcgcgacgtggccgacttcctgctggatctcggcacggacaagcaggcgcagtacgaagttaaagcccaaggacgcaccatcccgtgcacttcaagcgactttgccaacgcgttcgagcgctcgtccatctaccaacaagtgctggcagacctcgaagaccccgtgtaccccgggctcgtcctcgacaaggagacgcacatggacacccagcccgagttccacctgaacttctgggacagcaccgcgttgctcgtgaagcgacagatgagggtgacaatgcgcgactcggcagcgctcatggggcgcttgttcatgaacaccatcatgggcctgctgtacgcgagcgtcttctaccagttcaacccgacgaactcgcagctggtcatgggcgtcattttcgcgtcggttctgtgcttgtcgctgggccactccgcggagatcccgacgatcatggctgcgcgcgaggtgttctacaagcagcgcggggccaacttctttcggacgtcgtcctacgtgctctcgaactcggccagtcagctacctccgattatcttggagaccgtggtgttcggctccgtggtctactggatgtgcggcttcgtggacaccatcggggcgttcctgctgttcctcgtcatgctgtgcgtcacgaacctcgcgttcacggcgtttttcttcttcctggcgtcggcgtcgccgaatttcaacgtggccaacccgatctccagcgtctcgatcctcttcttcatcttgttcgggggcttcgtgatcaccaaggaccagattccggactacctgatttggttgtactggctgaacccggtcgcttggggcgtgcgcgctctggctgtgaaccagtacagcgactcgagcttcgacacgtgcgtctacggcgacgtcgacttctgcgagagcttcaaccagacggtcggagactattcgctcaccatgttcgaggtgccgaccgagaagttctggctctggtacggcatcgtgttcatggctgccgcgtacgtcttcttcatgttcctctcgtacatcgcgctggagttccaccgctacgagagccccgaaaacgtgacgctggactcggagaacaagggcgatgcgtccgatagctacggcttgatggccacccctcgtggctcgtcgaccgagcccgaggctgtactgaacgttgccgccgacagcgagaagcacttcatcccggtcaccgtcgccttcaaggacctgtggtactccgtgccggacccggccaaccccaaggacaccatcgacctgctcaagggcatcagcggatacgcgctgcccggcaccatcacggcgctcatggggtcctcgggcgcaggcaagaccacgctcatggacgtcatcgccggccgcaagacgggaggcaagatccgcggccagatcctgctcaacggccacccggccaccgacctggccatccgccggtccacgggctactgcgagcagatggacatccactcggagtcgtcgacgatccgcgaggcgctcacgttcagcgcgttcctgcgccagggcgccgacgtgcccgacagctacaagtacgactcggtgaacgagtgcctggacctgctggacctgcacccgatcgccgaccagatcatccgcggcagctccgtggagcagatgaagcgcctgaccatcggcgtggagctggcggcgcagcccagcgtgctgttcctggacgagcccacgagcggcctggacgcgcgcagtgccaagctcatcatggacggcgtgcgcaaggtggccaacacgggccgcaccgtcgtgtgcacgatccaccagccgtcctcggaggtgttcagcgtgttcgacagcctgctgctgctcaaacgcggcggcgagacggtgttcgccggcgagctgggcaagaacgcgagcgagatgatcgcgtacttcgagtccatcgacggcgtggccaagctcgaggacaactacaacccggcgacgtggatgctggaggtgatcggcgccggcgtgggcaacagcaacggcgacaagacggacttcgtccagatcttccagcagagcaagcacttccagttcctgcagtcaaacttggaccgcgagggtgtgtctcggccgtcgccgtcgcttccagcactggagtacagcgacaagcgtgccgcgacggagctgacccagatgaagttcttgatgcagcgcttcttcaacatgtactggcgtacggcgtcgttcaacctgacgcgcttcttcgtgtcgttggtgctggggcttctcttcggcatcacgtacgtcggcgccgagtactcgtcgtactcgggcatcaactcgggcatgggcatgctgtacttggctgtcgggttcctcggcatcggctcgttcaacagcgctctccccatcgcgtcgcaggagcgagccgtgttctaccgcgagcgcgctgggcagagctacaatgcgctctggtacttcgtgggctcgagcgtggccgagatcccgtacaccttcggcgcgacgctgctgttcatggcgatcttctaccccatggtgggcttcacgggcttcgggtcgttcctcacggtctggctgaccgtgtcgctgcacgtgctgctgcaggcgtacatcggcgagttcctggtcttcctgctgccgaacgtcgaggtggcgcagatcctgggcatgctcatgtcgctcatcttcctgctcttcatgggcttcagtcctccggccggagacctgccgacgggctacaagtggctgtaccacatcacgccgcagaagtacacgctcgcggccatgtcgaccgtcgtgttcggcgactgccccagcggcggcgacggcagcgacgtcggctgcaagcacatgacgaacgtgccgccctcgctgccggcgaacctgacggtgaaggagtacctggaggacgtgttcctgatgaagcacagcgaggtctggcagaactgcgccatcgtgctggccttcgtggccttcttccgcgtgctgacgctcctggccatgcgcttcgtgaaccaccagaagcggtaagtgtccgcggccgctggacagcaagtagacaccgtacttacacaaaacttgaaatatatcctacactacattccgtctttatctcttagcgctggaacacgcatactcggtcaccaaattctcttagctggaagatttttttatctagagtgaactcgtcgtagtactcacctggctgcatctcctccgtggagaagctgtctcagcaacaacactggcagaatcatcggtgacattactgagagcagctacagcagcgttggcggctgcaccggcagcagggcagcatcggccgtcttctgtcggcagtcagtttgcagttctgtcctgggctcaagttgtgtcgtgcgaagcaaccccctgtcaaagatgtttgtccgatcatttcaatttatcctctgggtctttttggctgaagcaccaaatcaccccgggttttaaatctttccgagccagtctctatttgaagactggcgagctgagaacttaacccggagtgctgccgctcggagctgatcgcagcagcagcgcttccgccgccgaagccgtgatgtgatgtgatgacgagcgcgttcatgtgcaagagcaatggcgttttattcagggatatgtatgtacacagagcagagctgaggtctcggctacttcttctggtggttgacgaagcgcagggcgaccagcgcgagcaggcgcgtgaccacgatgaagcccaagacgaaggcgaagttcttccagatctcgctgtgcttcatgaggaagacgtcctccaggtagtccttgaccgtcaggttctcgggcagcgagggcggcacccccgtcatgacctggcacccgatctcggacccgtcgccgtcgctcgggcagtcgccgaacgcgatggccgagaccagcgccagcgagtacttctgcggcgacacgtggtagagccacttgtagccctgggggatggagctgcccggcggcttaacggctgtgattgcagatttatagcttacattgtgactcattcactatctgacactgaccgaaatggtcccatccactgccttcgagtcgcctgagtcggtcacattcgagcattcatcgttgccttcagattttgcaccaggctccaactcggcttcagatgatactcagccacttgagtctgagccatcctcttggcttactgattgatatccgaagcggggtacgatgcctaccgagaccaccgtcaacaagctgccgaagatccaacaaagtgcaggcactgacaggatccacacgttgaacatgtgcggatacaggtagcttcccccgactatagccaagcggctcactccgacagcgtagcctacgccgcgtcctcgacgggctgtcttgtagtgcctcggagtgtacgcgaaaacgcagctccagcacccactcagcagcgcggttgccaagaaggagccagtgatgactagtccacgtgaccacgacacgtagcttagcaatacggagacactcgcagcaagtactgcaaagccggcaagcgcgtgtcgaggttcacgcgagcccagcacaaacgcggctgcaagcgagccgagtatttgggcgacgctcagcacagccaccgtgatccagcttccaaacaagttgtagccgttgagactgatgagcgtcggtacgtagatccccagcgcggacgccgacaacgtgactgcaatccacaacacccagagcacagcggtggggagcacccgcttgatcaacgaagacggcttcgcagcagcagcagaagaagaagacggagactcgagaatggacgtgaaatccagcacttccttttgaacttcatcgcttggaggctggacgtggtgacagcgctcgatcttgtcgataattccgtgggcttcctccgttcgaccgacactggcgagccatcgcggggattccgggactgtgaagcgcaacacaacggtgtaaacgacgattccgcacacaacaaggtaggttgtgcgccatccaagccaaggagcgacagcgtaggccagggccacaccaaccaagcctccagcacccgtgaaggcgtcaagaagtgacaatacgcggttttgcatggaacgaggagagagttcttgaaccagaacaagcgtcgacgagagctgcccacccaggccaatgccaacaatcactcggccgatgatcagcatatattgcacgttggcccgcgccaggacagcgaggcctcccagcgagaacaccatcgcgatcagcaacgccgttcgccgcccaaatctgtccgcaacgtggccgaaaatgggtcctccggccatggcccccatgaagatgctggctccgaagatttcgagcacgggtgtccccatgccgaggtcgttggcgacaagcacccgcgtgaatacgagcagcaccagctcggccgctaggacggcccagctcacgcccgtgagcactagcagttgcacgtaaaaccttgaaagccgaggcgcgagagcgtccagacgagcgtcaacactcagagtcgagtgcggaggcttgcggggtgaagcattaattgggtcttgaagcgtgtttggggactcgacagcttggtaccgcatgatgctgcagtactgtagttgttgacctctcgagctcaattgagaactgggatgcagttgggcaacggtttttgatactttggatggactgtcaagactgtccactggacacgctatgatgtgtggtactggacagggtaatcccgaccttcatcaacacggtgtgacacatttcgcatcctagcggcaccgcaaatctggacatggtccccgtaatacatgggcagtgtgtattacgggggggggcttgcagctttgggtttgggcgctgggatggtcagctcgcgtgaaggaaaactacagtgtatgatgtggaaatgtataatgttgtgtcgatgcgtgcaaacaaacgtgaggcaggatggctgtcaacgggcctattcttccttcttattatgactgcgaaccagtagcactgagctttcactgtcatctagcttgaccttgctcccagtagttctgtcgtcgcgcagtacagcgccttctttaaattgcagcataccgttccaaaatggtaggacagcccaaagcacaatcgccacaagcagcgcggcgaacatccacgctattgcaggcactgataccctccaaatgttaaacatgcgcgggtacagccaagcaccgatgacggcgctcaaacgactgaagccgaacgcatagcccacgcctcggccgcgagcctccgtcgagaagttgctaggtgcgtatacgagcgcgcagctccagccagcagcgagtaaagctgataccatgcacaccccgatgatgacaacagggccgttccaaggagaatggctcaggaccaccgctatcaaagacgcggaagcggcacagcgagccaaaagtttcttcggatcaacctcctccagcatcattgaggctagcaccgagccagcaatttgtgcgagaccaagcaagaccatcgtggtccatctggagaacatattgaacccccagagactgatgagcaccgggacttacatgcctagcgcgcgtcctgacaactccatcgcggcccacaccatccacactctcgtagctctgtcacgcattggtggcttcactacctccacggaactctccaaatcttctgtcgaaacatcgcgcagcatggcatgatcatcgatcattcgagttccgtgagcgcgctccaacctctcaactccttgcatcgcttcagtcactcgacccgaactcgctagccatcgtggggattccggaagaagacagcacaaaactccgacgacgaaactactgcaacttagaacaacatacgcggtgcgccagccgaaccgtggctccaaactcaaggcaagagctacgcccacgaccccgccaacgcctgtgaacgcgtgcagcaacgctaccatgcgacctcgcattgatttcgaggtcaattcgtgcactagcaccgtagcaacaggcagttctcctccaaatccgattccagccaggatccgagcaatgatgagctcatagtccttcctcgccatcactgacagtaccaacccgagtagtgacagagttttcgcgagtaatagcgcccagcgtcgacctttagcgccagcaatgtgtccaaactgcggcgcgccgacaaccgccccaatgaataggccgtcacccagagcttccaccgcgaacgttgtcatacgaacgcttctcgatattttcctccgcgcgaaggtgaagagcacacattcggctgcattgagcgaccagctgaagcctgtgaggagcaggagacggatgatgaaccaggaagggtaggcctctagagagtcgagacggcggcggacggtgttcatgacgacgagaagacgtgtgtgggtttcattttgaagaccgctccataatagctcttcgctacgaaaaactactcgattgataattatcttgcacgcaacagagctacagttctgaatacaggacctcctcgctacgtttgacgccgatgtcatcaaagtaccgcttccaactgcgaatctcgtgtcgctcatcgctatccaccgtccactcgatgacgcgagctcgccgagagaagtcggacgctccgtacgcgcgtccaaagccggtgccgcctccgtagcagagctgcacgccgtccacgagacagcagtactcgttgatatggtcgtgtcccacgaacgccgccttgacctcgttcatctccgtcaaagtcgagaggaggcgcagattcatgccttggtcgtgcacccactcgttcttctctccgttacagccgtcgtccgagtacgcgaactccaccagggggatgtggaagaacatgactgcaggcagcaccgagtccgacgtgctgtgtcgctccgcgcgtccggtctccgatagctgtcggtagtagtcgatctggctctgcttgatccagtcgtactgggaaaacacgtacgggtacttgtccgtcaacgcgtcggcacccgagtccaggaagtacatccggaagacgctgtccccagtgtccccccacgccccgtcaagcggcgccgtcacgttgagcatgtagttgccgacaccgtccactgtctcgggaccgctcacagtgtacgagtggttcttctccgagaccatctcgacgatcttctccctcgggaactcgccctcctggtcatggttgccgaacaccatcccgtacgggataccgcgctcctcggcggctttggtcacggcgtcgatagcccgttgctgcgagctggggccgtacacctgcacgttgtcgcccgtgaacgcaatgaagtcgggctcctccacgtccagcaactgctccacgaattggtacgtgagcgcctcggagcagttctcgctcgacatgcccgtcggtacgctagtgccgcagccaacggtcgggatgccggatatgtgcaagtctgtcaattggaggatcttgaacacgagcgaggagccgtccgagctattgcgagccacgatcggagcgcgctgggctgcgaccgacgcggagagcgcggcgatagttgatagcgttgcgagtgaagaaaacctcatgatggatcaagcagcgtgcaactttgggaatgacctttgaccttttgagtgaatctgccgtgagggactgaggtgagggacagggacgggcagcatacagtcggttgcaacaactgtaccgcctggactcgagtggaattcgaggatggtgttggacacgaacgagtttccgtctgctgtgtggagcagcttcacgcttcactgaagctcgagggcactacagtgtcccatagcgagattacttggtatttcgacctgcataatacaatgtaatgggaaaatacgatggagcaatgttgagtacagctaacgcttcgcgaccgacgttatcgtaggacacaaaagctatgctcagtaccgcataatcgaaaagcttacggggtatctgtgtgtgagttggacctgagtacttacatctaccaggagctttccggaagctgcttcaatggagatggcttgcttggcgagctaaccttcaccgtcgttttaatcgacagctaggattaactccgacgctcttgggatcggtatgtttattaatacttgccgattgtgctcgctgggtctaccaaatccgtaccatgtagcagctcgattcaggcgagacacgccgaaattcgtcgatccttcatctgtacatgtacatctaggacaattgcatcgcatgagcaagtactgttacaattcctccgggtaatcgagcagcattaccgcacgcgcgtgttcagttgaagcacaaggaactcatcactgcggctgtggccggcggcgatctgatttgcatcccaagattcgcttggagttctctaccgtgtcagtcgatcaaaatcctgcaagctaccgcttcattttgagcaacagagctcaacacacatccgatagaaagtgaagaactgtccaacggaccgagaagagacgttgcgactaccccaacacgcacgctccaccgaatcaactgccattgctactttggatcctctccgcaatgacaacgagccctgcagtcgagacgcctcgagttcctcctactccgaatgtatttcgtgtgtttccaacggcatcggagactgtcaatcaacggctggatgccttggatgctcgtctctcatggttctacgttcggctactgctgctaacgggtgtcagctgggctgttcacgctgcggagctcgtgctcttcgccttcacgcgacggctggtggtccaccatgtcggcatggggacctacgcgctggaagctctcggagtcggtgtgttccttggagcggcagtcggcggaccgctgtttggcctcctggccgacgctcgaggccgacgttcggctctgttgttcgccatgacgctatcgctgctgggtctggcgctgtctgctgtagcgaagaaggactaccacgtgatcattgcaagaatcgttgcgggggtcggattgggcggagaactaccagcagcgactgtgctggtgcaggagctctccccaagacccatgcgaggccgcatggtggcgctgcttgaagcctttacaggcgttggaggtgttgtgggcgtggccctggcctttggattggcaccgcagctcggatggagagtcacgtacttggccatctgcggctgtgtcttgtacactggagtgttgcgcttcggtatcccggaatctccgcggtggttagcgagtgttggacgactggatgaagctattctggttgtggcgaagattgagcgagcacatggagcgcggccgcgctacgacaacctcaaagtgcaggaagccccgacaccggtagcggttgagtccgtaccttcagctgcgggagtgaaagcttcagcattcgacagacctgtgcacacgctggtgctttggacactgtggacggtgctagctgcttcctcgtatgcgctgggggtgtacgtccctacgcttatcagcatgtcagggttcaatatgtacgcaagctggagcaccattgcgctgctgcacggatcccaagttgtcagctgtgttatcgcttcgtggatgctggaaacccgcggacgcaagcaatcgctcgcttgttgtgcgacgctgacgtcggtagtgtcagttctgctgagctacgcaccttggtacgagttcgtggtgattgtggggacttgctccgtttcggcactgctggcggggacgtggagctgcgtgctcgcctacacccccgagaactacccgaccgctgtgcgtgctcgtggcgtgtcgtacgcgtttggcttcagtcgcctcggagctgctggaggagctttgctctaccctcacatgttcgacgtgtggctcatgtcggtgtcggctatcacttgggtgttcgcggggctgctggctgctacagtgctgggtattgtggtgccgttcggctccaacccgtcgagtgttggatatagcaacgagtacagagttacgaaggcggacgactcggatatcgatctcgaatcgggcgacagtcacgaagacgagaaagaagaagatgaagaggaggaagagggagcgttcttcatgactggcgaatgcaagaacaaggacgaaaacctcaaattgaaaggcttatgggtaagcctttcaatttgaggttttcgtccttgggtaagcttacccagtcacgaaccggaacaagaagtctcgccgaacagtggacaccgtgactattaataattggcatgaaggagacgatttacgtaatttatgaggattgttgtgaaggagacttacgtaatttatttttatttcttcctggttttgtcgtttgtaccattaaagcggtacactatggcatcgcaaagtcccaaaaatcatatccggacatcttatcttatcttcgccaccatgaacagcgtccgccgccgtctcgactcactcgaggcccggtcctcctggttcttcgttcgactgttgctcctcacaagcttcagctgggccctcaatgcggccgagttcgtgctctacacgtgcacgcggcgaagtatggtcgtcagcatctcgaagagctcctttaaaagtatccggctggccatccacgtcttgagaccctttggcggcggcctgttcttgggggccgtccttggcgcgccgctgtttggacgcatcgctgacgttaaggggagacgctgggccctgctattggccaagagtgtgtcgctattcgggttgacactgtcgannnnnnnnnnnnnnnnnnnnnnnnnnnnnnnnnnnnnnnnnnnnnnnnnnnnnnnnnnnnnnnnnnnnnnnnnnnnnnnnnnnnnnnnnnnnnnnnnnnnaacaatcctcataaattacgtaaatcgtctccttcatgccaattattaatagtcacggtgtccactgttcggcgagacttcttgttccggttcgtgactgggtaagcttacccaaggacgaaaacctcaaatggaaaggcttatgggtaagcctttcaatttgaaaggcttatgggtaagcctttcaatttgaggttttcgtccttgggtaagcttacccagtcacgaaccggaacaagaagtctcgccgaacagtggacaccgtgactattaataattggcatgaaggagacgatttacgtaatttatgaggattgttgtgaaggagacttacgtaatttatttttatttcttcctggttttgtcgtttgtaccattaaagcggtacactatggcatcgcaaagtcccaaaaatcatatccggacatcttatcttatcttcgccaccatgaacagcgtccgccgccgtctcgactcactcgaggcccggtcctcctggttcttcgttcgactgttgctcctcacaagcttcagctgggccctcaatgcggccgagttcgtgctctacacgtgcacgcggcgaagtatggtcgtcagcatctcgaagagctcctttaaaagtatccggctggccatccacgtcttgagaccctttggcggcggcctgttcttgggggccgtccttggcgcgccgctgtttggacgcatcgctgacgttaaggggagacgctgggccctgctattggccaagagtgtgtcgctattcgggttgacactgtcgatcttggcgaggaaggactacgagctcatgagtgcgcgattcctggttggtattgggttcggtggagagcttccggtcgccacagtgctggtgcatgagttggccccgagaggcatgcaacgtcgcatggtagcgctgctatacgcgttcgcaggcgtcggggggatcgtggggttggcactgaacttcgttgttgagccaatgttcggttggaggggcgcgtacctggtgctctgcatcggtatgttgtacgtgggcgctctgtgcttcttgttcccgaagtccccgcgttggctggcgagtgctggtcgagagaccgatgcgatggctgcagtggagaacttggagcgcgttcatgcgtcccggctagactacgatcgtgttacaggagaggaatctgtgcagacggaagagctggaggcttctgttgaggctgagagtttgacagaaacagcgaagccaccagtgcgtgacagtgctgcgagagtttggatactgtgggctgtgctggagttgtccggatacggactaagcgtgtacgtcccgctgctcgtcagtctgtgggggttcaatatgttctccagatggactacgagggtcttgcttggcctatcacaagttgctggctctgtgctagcctcgatgatgatggaggaggttggcccaaagaagcttctggctcgctgtgccgcttccgcgtctttggtagcggtgatcctgagccatgctccttgggacggccctattgtcgtcatcggagtgtgcatggtatcagccttactcgctgctggctggagctgcgccctcgtgtacgcaccgtccaacttctcgacggaggttcgcggtcgaggcgtgggctacgcgttcggcttcagtcgtttgagcgccgtcatcggtgcttggctgtacccacgcatgttcaacctttggagggtgtcggtgtctgcgatagcgtggatattcgccgtgctgcttgtggtggttgtgctttggatcgcccgtccgcttgagcgcaacagcctgcagctgcagtccaataatgacagcgatgaaaaggccgagtttaaagcccgagacaaagtcgtccaagacgaagaagacgacgatgacctgccactggttgtaaaccgtggccggtcgaacaaggacgaataggaactcattgctgtaatgttgagtactgcttcagagatgaatactctgccgactcgataccatacatgccactcaattgggtgtgtcccatcctacagattcaactcaagattcgcttatcgaacagtctccattccaccccctcggaatcatgccaagcgcagagatccaccgtcgcatcgactcgctcgattcgcgtctgtcgtggttctacgtccgtctcctcctcgtcacgggcgtcagctgggccgtgcactcggcggagctcgtgctcttcctcttcacgcgtcgactcgtggctcgcaatgtcggaatgggcacccgcgcactcgaagcgttgggcgtcggcatcttcgtgggggcggcactgggcgggccactgttcggtcgcatcgcagacgctcgtggccgacgttgggcgttgttgctgtcgatgagtctgtcactgctagggttggcgatgtccgccatggcgaccaagcactaccacgtgatcatcgctcgagtggtggcaggtgtcggcctgggcggggagctgccggccgctactgttttggtgcaggagctgagtccgagacccatgcaaggccgaatggtggctctgcttgaggctttcacaggcgtgggaggcgtcgtgggcgtggcgttagccttcgggttggcgccacaaatcggatggagagtcacgtacttgggtatctgcggcttggtgctgtacgtgggcgtactgcgatttggtctcccggaatctccacgatggttggcgagtgtggggagagtggacgaagctctggcggttgtggagaagctggaggaagcgcatggacatcgaccgctatacaagaaactcactggagttgatgacccgatgacaacgagagcttctccggcaaaagtgctgtctttggttaatccatcggtgcatacactcgtgctgtggatactatggagcgtcatggtgctgtcagcatacgctctaggggtgtacatgcctacactcatcagtttatggggattcaacgtgttctcgagatggagcacgatggcgttaattggcgtggctcaagtggctgggtgtgtattcgcgtcgcttgtactggatgaattcgatcgcaagcaggcactggctgctttcgctacttcagctgcggtggtagcggtcttgacaagtcaaacaccgtggaatggcccatttgtggtcgtgggcacgagcgcagtatcagctctcatcgctgcaagctggagttgcgtgctggcctatgcccccgggaattttgcgacggagtgtcgcggtcgtggagttggatacgcgtttggctttagtcgactaggcgctaccatcggggctttgctgtgtccttacatgttcaacgtgtggaagatgccggtgagtgcgatcgcttgggttttcgccgtaatactggtgggagtagtttatggggtcgttctcccttatggacgcagcgatttggcacgagaagatgaagataacctggactcgcagagatcttacttgttcggctctgcaccagatgaagaagacatccctcttgtcccgggttacagctccaagacagcgacctataacgtataactctggctactgccaacacgcttttcgctaagctccaaggttcttaccagagcctggaggccgttccatgcggctccgcaagatttcttgataaagacgcatgagtacggctaattgggactagaaaactgagagctggcgagtttgcttccaagtgaggaacaatcaggtgaggggggggggggtatctagcaaaagttccatcaccgtgaacgagaccgtagttttattgtcatttgccttgctcgcaaagcagtgcgcacgctcggaacgcgcagctcaagggcgagcttgtacttcagttgcatcgaatattcacttaacccgacctgttgactcgtaatgcgacgcagtcttcgatccatcccgggcccggattccctgtctcgccataatggaatgccatcttcgtcaaatcttccttccccgagacgttcctgcatcacacgcgctcttcgggtgcagtgatggttttgactgcttgcgttgacgatggtaggcagctcgggcggcacaacaggggtatcatttcataatggttcgagctgcagacaccggcatgacccatggacgccggtggcaatgcgtccggggccaataggaaacacagtacgtgcgcagcaaagtgaccgagctgtctggaaagaggctggcgctttactgctcgatcgagaccgcgtcacccaatggcgcatccttaggaagtcgtcacgtccgaggctcggagactggttgcagcacttcttcaaggggccatgtatcctctccatgacgtctgtgtagttgacgtgagtaggatcatggtctgtagacccgtcggctttgattctgtccagcgaagctaagtggcagtgcaagtaggccgcattggacgttgcgtggctttgcgatctctggtgttaaccggccgtcgcgtggtaaggcgatcgaaaaggatccgagattaaacggcaccgcattttgcgtcggcaccaccgccggacgaggccaccaaagaagagctaaatgtagcgtcctctgcattgtcacgagaggaaatggcgtgcgggctgctttcaatggccaagtgatgcaagtacttacgtctggagagctagcagagaagtcattgagcgacagccccaatagtggaagcgagttgcactgcaaccgttgcagtgcaacgtcgattgcctgatgcgttgaataagtcgggcgctaattttgcgggaccccgcaataggctcttacaatcgaggtagatctcactctgagcggggctcctctccgcatgaatcaagtggcggtacaacaccagcaagctcgccctcccgcaagttcaaccgagccttggccctttgagcgaccgatggacgccaaccgccagtgcactggcagtttgccttcaacggcgtgtgctggctggtgctccagcgcagcaaaactccaagtgccgcgccgcagacgatggcaagcgagagattcctgaagcagtagtgtgcaaatgctgcagcgactagcaaagcccctttcgactcacgaagtgatctgtggcgggggttctaagcacacctcgccccatcctccttctcgtcttttgatcgcttgtacccgtagggaacttcagccaagcggcggatgagtcgcaacccccacgcggaccaacaacttgttcgcctcgatcacaatgggctattgtcatgcgtgggttatcctcacgtcttaatgccggcgataggccgcattaccgccgtggtaagcgtacactcacgatctgcccgattaaagtcgccgatacattttgcacgccgacatgctccaagttcgagccaaccgcccgttgaaaggctcgatcttgtttggcgagagggggtcgagggaaaataaatcaagtggcggccacatcagctaacttatccagctgagctgtgagtccccgacaaaatgcaggttcggcgcgcgcagcttcaagcaagctgtcacgacaacttcaattcgcagaccaatccgtccgaggggtcctctgtggtatttaatcttcgtcaacactggcatgatgatcgtctagcagtcttttactgtctgcagccttcaccttttgagctcggcccagctgagcccactcgctctgctcttcattcgccaactttctccgcctcaagcaagtgcagtgcatccgagctcacgtccttcgtggcacaaccaaccgaccgaccatgagcacccaagacgacggcgtcccgaccgagggctcgcgcaagtacgccattatcgtgtgcgtgttcgccgcgctgggcggcctcttcttcggctacgaccagggcgtgacctcgggcgtgctcatcatggactcgttcatcaaggactactgcgtcggctggcacaacttcacgtacgagcagtgcatcgcctccacgtccgcgctccccagcgagtggacggacttcaccgtctggtacaacatggcgtacaacctgggctgcctcggtggcgccttcgtcggcggcttcgtggccgacaagctcggccgtcgggccaccatcttctgcgccggcctgctcttctgcatcggcacgtcgtgggtcaccttcaacaaggccggcgagcacggcctcatgtacatcgcgcgcgtgatccagggcttcggcgtgggcaactcgtccttctcgctgccgctgttcggcgccgagatggcccccaaggagctgcgcggcctgctctcgggcttcatgcagatgacggtcgtcatcggcctcttcctggccaacgtcatgaacgttattgtgcaggaccacaaccgcggctggcgtaccaccaacggtgtggccatggcggcgccgatcgtggtcatgctcggcatcttcttcgtgcccgagagtcctcgctggacctacatgcacaagggcaaggacgaagccgagaagatcctcaagcgccttcgtatgacggacaacgtgggccacgagctccaggccatcggcgaccaggtcgaggaggagctgtccgccaacaagggacttatggagctgctcgagccgtccatccgcaagcgtgtgatcatcgccatgctgctccaggtgctgcagcaggccacaggcatcaaccccatcttcagctacggcgcgctcatcttcaaggacatcaccaacgctggcatctacgcggccttcttcctctcgggcgtcaacttcctgagcaccatcccggccatgcgctgggtggacactacgggccgtcgtaagcttctgctcatcggcgctgtgggcatggtcgtcggccacctgttcgctgccatcctgttcacggttatctgcgacggcaacgtggacaacgcgggttgccccaaggtgggcggctggttcatcgccgtgggcacggccttcttcgtgttcaacttcgccatctcgtgggggcccgtgtgctggatctacccggccgagatcttcccgttgagcatgcgcgctacgggcgtgacgctctcgactgcggccaactgggccatgggcgccgtcatgacggaggtggtcaagctcttcccgcacctcaacatcaacggcgtgttcttcctgttcgcgggtctgtgctgcatctgcggcgtgttcgtgtacttcttctgcccggagaccaagggcatcttgctcgaggacatcgaggcgctgttcgacaagggccacgccaagtcgccccacttcgtcgaggtcaagtcccccatcgagaatgcttaagtgcatccaagtgaagcaacaagcgcacctccaacttgcagagctgttgtagttgaagacagtcatgttaatccttcctttgtttccacaacatgtaaatgaagttgatttctcctaatacctgttgtttccgagatagcttacaccatcgtgatctctccctcaatacaagatggagagagatatggccacttgctggtgattttaggccgacgcacagaactaaaaagcacatgacgccggttcgacaactacatggagtaaagtaaattgatcggagcaacacgatttctgccgacccggagaaatgtcgatattcctgcagacactcactgaagacattgagacgataaagctctacgttatctcgtgtcaaccatccaaaacacctgataggtggtcgtcgtcttcaacttcctgccccgatattttaaccaatcaaaccgagtggtgctgtctagcaaaacggatccgtacaccttccagatgggtccactcttccttaccagagaccctgcaatcgttgctctgtggctcacagtgtggggccggggtggcttcacaacttgtccctccatttcccaccgcctgcgccgcacaggctgtgcgtgtcaagcaccaaagttggtggtccatttctcctttcggctctgcagacacaccaccaaaactcgggaagacttgctccagcttagatgaagatcgtgacgcaactccccaccgacaagcgcgacgccgctgtggccgctgctgcggtcgtgacgctcggtctgctggtctcgtacctgtcgaggcccaaggacaaggggaacaagccgaagcgcaagatggcgcacgtgcccaagtccacgctgccgctgctgggcaacatgctggacatgtccacgaacatgccgcgcttccacgactggatcagcgagtagtgcgccgagttcgacaacgagccgtggacgctgcagatccccggcaaggagccgtggatcgtgctgtcctctgcggaactgtttgaggacgtttctgaagacgcaggcggacaactttctgcggggcccggtgagtcatcatcaggcgtacgacgttttcggtaacggtctgtccatctcagatggcgacgcgtggttctaccagcgcaagacggccagtcacttgttctccatgcagataatgaagacggtcatggaggactctgtgcgcgagaagttggacgtctttctggacgtcctcggcaagtacgcggcgcgtggcaaaccgtttggtatcaaaaaatggctgagtcacttcaccatggacgtgttctccaagatcggctttggcgtggagctggacactctgaagaacacctttgaccaggagggagatcacgagttcctcgaggccttcaacgtggcgtctgtggcttttggagtgcggatccagacgcccacgtggctctgggagctcaagaaattcttgaacgtcggctgggagaagattatcatggacaactgcaagaagttccacgacttcatcgacagcttcgtcctcaaggccatggtcgagagaggccagaacaaggtggcgcgcgatctcatctcgctcttcctcgatagctccatcgacacgtcggagctgcagatcgaggaggacgaagccactatcatgcgcgatatggtcaccacgttcatcttcgcgggtaaggactcgtccgctcacagtctgggctggttcatcgtcaacatgaaccgctatccggagatcctgcgcaagatccgcgaggagataaaggagaagctgccgggtctgctcacgggcgagatccaggtgccgacggctgctcagctccaggaactcgtgtaccttgaggccgtcatccgtgaaaacatccgtctgcacccgtccacgggcttcattatgcgtcaggcgacagaggccacgacgctcgttgatggcacgttcgtggacaaggaagtctcggtgctgttgccctcgtacgccaacgcgcgcaacccgaggacgtggggcgaagacgcatcggagtttaagcccgaacgcttcattgatgctgacaccggcaagatccgcaatttctcgcccttcgtctttagcagcttcggctccggcccgcacatctgcttgggcatgaagcttgctttgatggaggtgaagctgacgctggccacgctgctcagcaagttcgacttcaagactgtggaggacccgtggcagatgacgtacgatttctcgctcacgatccccgtcaagcgcccgatggaggtcgaggtcactccgcttgtgaccccctacgcagattcggcgtagacttccaccaatttgttaatgttgaaagcgtagtgcttgccgaagcgaatatgaagaactggtggcaactgcttggccataacttaggtgcccgcattcagattcattatactgtcgttgccgtgctgcttaccattaaaaaaagctcgcaagaatcttgttgacttcgtcgtggtagggcaaaaccttaatcctcaagatgtcgtaccacatgagcatctcataggaagagtcaacttcgtcttcatcaaaccgtggtcgtcgacagagcctcgccgaagacgaagttgaccacttaccataattgccccatttgatcgaaaaagaggttcctacaccctcactcttggtgactattggtatgctattatttgatagatttctacgcagaacatcgatacgagtgtcaattaagctcgctgagggtcaagtcggcggaagcttgagcgaggatagcttccatgtccttcttgatcaagcgtaattcgtacgcaatgacagctgcagctggccgttgtgcctggtcttcgacaagacatcgctcgaccaagtccttcagtgccgggctgcaatctgaccccacctgtgggtgcagtttgcccgttgcgacgcgatgcaagatcgtcatatccgacagaatcttcccgttcgacccacgcgcgttgctgtacgggatcttgttggtgtccagctccgtcagcagtgcaccaaaactatagatgtcagcagcagagccatagtccgtgtcacctcgaatcacctcaggcgctagccatcgaccggtaccaacaccacccgtcatagtattttcgactgatcggaagcgtgaagccccaaagtcgctcaactttgccttgaaatccgatgagagcaatacgttcttggacttgagatcgcggtggacaagcgggggcacaaacgagtgcaaatacaccaacgcttcgatgactccaatggcaatgttgaacttcttgtttgtccaaccgacgggggtattcggactcgagagatagcgacggagatcgcctccttccatgtactcgagcagcatctgcagatcactctcgatcgtccacgctgcaccgacgaagttgacgagattcgggtgatcgaagttggcgacgagcttgatttcctcgatgaacatgattgtatgtttcttcgtccgtctttccggtcggagtctttttgatgccagcaactgcgaatcccggtagcgcacaagccacaccatagcaaatgccccattccccagttgcttgaggtctttgacgtctgctgcgcgcacttgcaacgatagaagatccgggtcgttccagatcgacatgaagcgggcaggttttcgttctgctgccgccacggtcggcatggacgaagggtaggctgaactgccctggacagacgtcggaacgcccatactaccatccacggacgttgggatgcccacactaccatctatcgacgtcggaatgcccatgctttcgtcgtcgccgcctcccaccgtttggttcgccatcgaaaactccgtcgaggtcatcgggatgtccatggcatacacggctgaggtccgcaggtctccatagtgttgctgttgaagcacaaggtcgctgtcgatcgaggggaagcgcgtcccgctgaattcgaaggattcaccgagcttctgctgtgcagcattcttctgcttccgtcggtaaataacgaagaggaagatggcaaatagaaccaccaaggctccacagacaattcccacgatcatactcgttgaagaggacgagtcagatgagctggtagtcgtcgtctcggatccattactatcggttgagcttgacgcagtgctggtgccgctggtcgtatcacttttcgttgtgctcgtggcatcggcgctagtgtcggtcgacgacgccgtcactccagacccaagacacactgtcacttcgtgaatggcgacttgttcgctgtcgtcgcactcgaggtccacagtgaagtcggaagcagacagatacaacgtctctaaatcattcaagaagtctgcctgctcgcgcgtgaactctcggacggagaaggggttgccagtcagatttctgcgttatttaacaacacaaagtgaggagttcaacatgagctccagacgacggagtaatagtcaacgtacagtgtcttcagatacgaatgcttgtaaacggcggtggggacgcttgtgaggttgttgtcacctagaaatctgtacacccagagagagaaaataaaactgtgagctgccccgcaggaacatattagctggcaaactttcaatgcgtacaggtattctagattggggaagacgcctgtaaaagctttgatgctgttgccctctagactcctgaagtatcacaacaggcaagctttgtcagtcgaaagatatcggagtgaaatcggccaaattgcaagcacctacagcgtagtcagcgagtcgatcacgtccaacgtatctacagacgtgatgtagttgtagtccaagagcctataaccccccccccaacacagaacgattagcggtctccaaagcaaacaaactgatgcgatgtatcttacagctgctggagcgatttcaggcccccaagctctgctgggaacgtctcgatcagcgtgttggtaagctcgaggtttgtgacagtggacggcagtaacctcgccaagtcgtccgcctggtccgacaaggcgaggttctgcaacaccactctcgtcaccgtggcagcagacgaaataaagtccgacgtcaacgtaacactcgccactttcccctgcggataattcatcgcagcagttcctcccgacataatgctaagtaccacaagccaaaacatacaaatccataagggtaagttctaattcctcaccgaaacatactcaataggatgaacgtacaaggtctcgactgaatcagacagtgtgatcgtcccaaccgcagtgacatcgtcgttactagccgatggccacgtatccgtgaagtccgggtagcctgagacggagaacccccctgccgccgtctcctgggcgcttcggaacccgccgaagtcaatgagcacgtccagcgtcgtcaagttcccgtcgacgctcatgcagtcataggtgcagtctccgtccgtctcgcagcctgagccggagcatgcgctcttcgacgtgtaaccgagacacaagtcgtagcccccacagcccgaacacccctcggtcgtgagtgtcgacgacccagatgcacacccggcgctgctcacgaggctcggactggcaatcagcaccagccccagcgccaatagacaccgaccgcctgctgccattctccccacacaaagtgagactgccgcgtcgcccgaggggtcaaagtgtcaatgcagaggagcgacgaggctaaagcttgcatatcgacgatagagacgcgataccagcgccaaatccttgacgcaaaacaagctggacccccatcaagctggccactgggaacgacttaatgccactgacaccagctgatcgatacagaaagatgaatgtaaaagttcctcgagatccttacgcgacgatggggtgtgcctgtgactctgcactgccgagtctgcagtcacaatacgaaaaggatggttgtgtgtctgcataggtcactcgacgaagaagtggaaagctcagggcacagcaaacactactcgagatctgttagcggatagcctttgttggtatattttgtctcaagctaactgtacagtaaagcctaagcagagcctcaaattctgttggtattgtaatgttcgacttgacactggggctttatgacgcatttgccccgtgccaaataaatgcaccttcccttccgtagtctatagagaagcagccatctccttctgcagtacgcgcagttcgtacgcgatgacggtggcggcaggtcgcttggtcgggtcttcgaccagacagcgctctaccagcgccttcatggatgcattacacgtggatcgaactttcgggtgtagcttgccggttgctacgcggtgcaggatcgtcatgtccgagaggatcttgccgttcgagccgcgcgtattgctgtacgggatctggttcgtgtccagctccgtgagaagagctccgaagctgtagatgtcagcagagcagccgtagtccgtgtcgcctcggatcacctcgggcgctagccagcgaccagtgcccacgcccgcagtcatcgtgttctccacggatcggaagcgagacgtgccgaagtcgctcaactttgccttgaaatccgatgacagcagcacgttcttggacttgaggtcgcggtggacaagtggaggaacgaacgagtgcaggtacacgagcgcctcgatgatgccaatagcgacgtcaaacttcctgagtgaccagccgaagggagtgctggcgtccgcgagatagtgacggaggtcaccgccgtccatgtactcgaggagggcctggaggtcgctctcgattgtccacgctgctccgatgaacttgacgagattcggatgctcaaagttggcaatgagcttgatctcctcaacgaagtttgaggtgtgcttcttggtccgacgctccggacggagtcgtttagacgccaacaactgcgagttcctgtatcgaaccagccaaaccgtggcgaaggctccgctgccgagctgttccaggtcctcaatgtcctccacacggacctggacagacaggagctcagggtcgctccatacagacagaaacgtgcttggtttcttcctcggtacggcatccgccgaagacattgggtaggtcgtagcagcttcgactgttgtcgggacgcctgtactggcatcctcctcggctgatgctgttggaatacccatggccactccactagcgctcattgggatccccagaggaactccagtagacgtcctcagttggccaaatgactgctgtatccgctcacaatcgctggttgtagacggaaaatggtcgtctgcggtgctgctcagcttggagtcgatgaaagtactctttctcttcctccggtagaccacgaagatgatggcagagacgatcagcgctaaaatcccacatatgatccctacgatcatgctcgtcgatacagaagaacccgctgaagaggtagattgagtgtcggatccatccacgccagcagaactcgaagcactagctcggttattcgatgtagaagctccatcgctgaggcacaccgtcatattgtgtactttgacctgattcatgtcgtcgcaatccagatccactgcgaagtcagagtccgagagcaccaagatctccaagctgctcaggaaatcggcttggtctcgcgtcagggatcgcgactcgaaggaattgcccgtcagatttctgcggcagaacacaaaacattagatccagatccagcagcaacacacaaaaagcatgctacgcacaataaactcaggtgcgagtggctaaatattgctgtggggatacttgtcaggttgttgtctcccaagtatctgcgtaaccattacagaattgagttagttagttcatctaccttcagtttgcttgtgaatggttcgccacgtacaggtactccaggttggtaaatactccattaaaactctcgatgctgttgctctcgaggctcctgcgatgaagaaaaaaggtaagaaaacaacttattaataccaaagttccatccagaacagcgtacgcacagcgtcgtaatggagtcaatcacatccagcgcgtctacagacgtaatgtagttgtagtccagaatcctaacaattcaaaaacattctgtaagctggttgaatcaccgccacgccaatacacaatacacgcacttacagctgctgaagagacgtcaggccgctcagctcagctgggaaatccgagagcaacgtattgctgagctcaacatactcgaccgtagacggcaataacgacgacagcgatgcaatctcatcgtccaggtcgatgttcccgagcattactttggtcacagctgtcgccgccgaaatgaagtccgcggtcaacgtgacactcgccactttgccttgcgggtagttgacatccgcacttccgcccgacatgatactgcacgcataatatccatcagtctaccatccgaaccatttgagtactaacgtcctcaacgtacaatgtagtgactgcggaggacacgtcgatggtgctgaccgcagtgacgtcgtcgttgctggctgacggccacttgtccgtgaagtccgggtacccggccaagtctgccgtcgtgtagcctcccatcgccacttccttcgagctcttgtacccgccgaactcgatcagcacgactaaagtcgagaggttggcgtcaacgctcatgcactggtaggtgcaacctccattggtcacacagtcggagcttgtgcactcgtccgcggagctgaaccccaggcataaatcgtattccccgcagccggaacaaccctcagttgtcagtgttgacgaaccggcagcgcagtcagcagtggcaacattgacggcattgaggaggagagccacagtcaatactagcggtagacgccgaccggatgaagtcgcccccattgccaacgacaccgaaaagagcgaaatgcgcaaattccaggaggtgatgaagaggagggcgggcgagtggggttcgcccatagaaacgggagtcaaatcctagaggcactcggctggatggcacgaagtgctacgccgtagcctacggcgagtagctggacctactcaggcgatactctacgcaagatcagcctgggccacctggtcgccgcgaaaggatggcgtgaattttgaagcgaggtttgtacctacgtctgcgctctcttggctcgcgacttgggtcacgtcttggtgtggagtctccagagccattgagccgctacgatctctccaccgcagcgtgacaccgaccgaattcaacggaagtcctctgatccagccgctattacagcgcggacgccgcccgaaaggctggttgcaagttcgtgctgcgtccggcttcaggatacgcgcagcgagagcgcgataacctgggccacgtcaccaactgtaagctactgtacagtaagctggttttgcacatccagcgagatgtgtccgcagttgcagcgtgaagggctcaacttgaggtcctcaagttgagcccttcaagttggggacaagcgcacagagctgcatcgccgtcgagtggagtgaagcctggtccggccatctcgccaagcctggtctctgggcaggtcggaaaaaaggagacccgcccagagccttcaccaaaatattgggatgctcgcgcccaagtcgccgaccctttcacagctcagccattgctgccaccagctacctttacgtgtactgttagctccgtacaatacacagaacaagctcgagcattattgatcgtcgatcggttcctacgagaaatcaagtgtgatttcgaggataacttagtctgcagcaactgcgtgttgtctgtgactgagtaatggagtggtggttgaggactatgactactcgaagagacccgagggtttctgagaatgactcctgcatgcgtgcagttgttgtgattggctgaagccaatgtagtcggaaagagtccacgggggttttactgcttgcggagctttcccctacaacaacacttgaaagaataaacatatctcaatttgacccacaccaagcaagtcgttcctgttttatggttaatctacttgtaactgtgttactgaggattccaaggtgctccatgggactgagagtctcgtagttccccgctggccctgcacaatgttcacgttgaagtgcttacgtatccatccgcatttcatccaatccgcatcctccccgcccctcataggtcaaaagtcctcgttgtctcatctccttgaagctcgggcgctggtttaacgagagaccatcatcactttgaaatctcccccaagcattgcaagtcaagtcaagtcaagtcaagtcaagtcaagtcaagtcactttgccactatgggcttcatcgccgaccgcttcgacctggagaagcaggtgacgttctacctgtcgtaccacgacaacaagatgaaccagtacatccacctggcctgcatctggcccatcttcgtgtcggggctcatgatcctcgcgcacacgcagccgctggccgagacgccctccttcgtgtcctcgctgccctacggcgagtacgcggtgctcaactactcggccgtcatggccgccgtctacatggcctggtacgtcgccctggacgtgtacgcgggctcgctgggcgccggcatcatctccgcgtgcttcgtgggcgccaactacttcgtggccgagggcgccagcgccctgggcgtgcacagcatgcacgcggcgctcgccgtccacgccacggcctggatcctgcagtttattggccacggcgtcttcgagcgccgcaaaccggcgctgttcgacagcctggaccaggcgctgatcaccgcgcccatgttcgtgctgctggagatcctcttcccgctcggataccgccccgagctctaccagcgcgtcatgaagcaggtgcgcatcaacgtcaagaacttccaggccaccaagacgctttaacgccctgaggacggagaaataggggccacaaggcgggttttctcatcaaaaaatgtatggtgtgcttcgtgaagtatctactatatatgcacgctgatgcattgttgttgtgatgtgagttttaggacgcgacgacgatctcagccatctccgtgaggctcttagcgatgccctcggcgccgctgacgaggcagttgagcagcagtagctcctccatcgacaccttctcgtaccgacgatcctccagcagccactcgacgtacgcagtcttcatctgagcagcgatgtcgctggtggagaagtcctccacgttcagcacgtcgtgctctcggcacatgggagtggacgacgcagcggaagactgagaaggtttgcggcctctctcaacggacgaagcctgtgacgagcgtcgatatccttcattcgagggcattggagccctagaggtgttcaccttggcgtccaatgcattaatcgcttcggcagtgagcggggccttcaggtgagtgccgtcactagggtgaatagctccggactcaccctctgcgcccttgggagcgtcgctctcgctctcttcaccatccacaccgtcctcgttgatgcaaggtagtgcgttctcccgtctcgctagaagcgctggagctttaggctttcgtcgggtgtacacttcaacttccagcttgaggccgttctctagcgcctccataaactcctcgaacgagactttgccgcttcggtccttatccacgacgcgcatgaactcctcgacgtacttgtggatctcaccttgcttcacagctccagactgggtgaagatggtctccaacatgtccgcgacctcatcggcgtcgatctcgccgctgcagtctttgtcagcgagacggaaggcctccttcatctgcatgaagatggcggtttggtccgggtccgagtacaggaaggcgtcgccgaacagcatctccagtgtgttgaacgagtccttcgccgcggtctggaattggctggctgcggcctgccactttgcatggatgctcctgtccgacgaaggcctcgcagcagtgaggctgtctcggatgtcgatgctgttgaggtgaactcggttgtgttcaacacggtagttgaaccagcgcaggagcttgtagaggagcgtgttgttgttcagcagccgacgcgagctctcgagaaccttctcgtacttccggaccgagaacaccggacgccatagcagcggctccgcttgtgcctctcgtagcagagtgatctgagccaaatgcttcgcagggatcttcacctgcaggatctcgcgcaagtgctccattgtatcggcgtccatggtgctggagctgctcaagtggtgaccgaataggacttcgaatgcctccagctgcagcttgagcgtcttctggatgtttcgtcgcagcaagttggtggcgctcttgggacacagtagcagctccacgagaatgaagagtacaatacccacagaagtttgagcgagactcgagtacgagctgatcgcgatggaggaagcgttgtccgcagcatttgagtaacacaagtccgactgacgcatcaaaatgcccgtcgacacgaaggccgagaccaagccagcgtacgaactgtagccgcccacgtagcacacgtacatcgagatggcgatccacacgaacaacacgatgtccgaaagcacgacgttgagatactgcgggtcgcagatctgagcaatgaagaactggaagaccgaaggcaccacactgccggccacgacgccgccaactcgattcactgtcgcgctgaagctccctcccaggtagtttccaagcacatacgcaaccgtgctagggacagtggcgttgaagccgtagacgtatacggacaggaagatacccagcacaatggcaatggatccccgcatcgctgaaagcatagcgtggctatcggtgtagtgcttgggctggaagaatttcctgatcgaggccaagatgaacgaccggattcggtgcgcatccgtgtagttcttcttgttgtggatatcctggaagtcgatcatcgtgctgcagaaggagttgagcgagaacaggaagagattgagtggcacattgcctgccatttcttccagcgtgactggatgcgtgcgcagcgtgcggttctgtgtggagcggtaccggtggagcgttgtctccatctgcgcctctagccggggaatcgactgaagctttacctctgcaattggtcacactatggattagttcaacgcgcggatcactattcattgttgttggtgacttaccacgggaggctgactgcacttcacgcgcaatctcattgagtagatcaccggagcgcgtctggataacgtagatctcacgctggagcaccttcatgtacgtgaagtggaggtgctcgtatttctcgagctgcatggcatagctgagcgtgcgcagatccgagatcagcgacccgaccagcttcacgtagttgaacatgatgggtcggtggaatcgcagcgtgtagtggaagccaaaggactgctcccaccacgcatctgttagcaaagcgttcatacggcggtggcggcctgcggcggcgtcgaacttgcgctggagcttgagtttcaggaagttcatgtggtccatgttcttgttcttgaagcagtacgagtccacgatgatgttcagcaagtcgagaatgtcctcagctgcgcccttggtttccttgcgcagtcgattaatcgcactgcatttcaagtagcaacaccgtcagcttgcaaggcttcgcaaaacattgcccaagtccagagatgcttacaagattgggtagggaacgaacatgatgccgagcgaaacgagcgagccaacgatgcccactaagaagtacacttccaggttgcgcaagatattggctgtgtcaaaactcgagtcatcggacgttttgagccccgagccgacagggtttgccgggttaatgatcgtaagaactgacaaaagtgacaagattagttagaattccgatcaacagaaccactaattcaaaggcaagacttactgaagtagaggttgttggccactgcaaacttcttggttgtcgcggcgaacggacaaacgaggaccaccactgtgaagattatcatccagggcagcgtcgtgtaaaagttgtgaagattcacccagtaggtgctggatgaaaacgcctgcttgatctcgatgtagccttcgtacggatcctcggcgtttatgtcttgggtgtgaacgtccatgcaggcaaaaatcacgatactgtagaccagtgccatgcccacaccaaggaaggcttgccaagcgatcatgagcgtgctgccgatgttcttccccgtcgtgaacagaacagcaatggcgcagtagctcaaaccgccgagatagtaccacgaagggaacaacacccactttttgccctcatccgaaggatcgtagtcggacactcgagtctggatgcaggaagcaatcaaaactccacaggcgactcgaagtgacatttgagtgttgaaccggaactccgctgtgagagagagtccaaaaggttagctccttctgagtccgaattattggtgcagtacatactacaaatgcaagccttacatgaaaagcgctgctgctccaacgaggacttgcggcctccttcgaagtcgattcgtagcttggctgccttgtcggcgaagtcgtcgctacagacactaccagcagttcctttacgctgaggtcgacgtacgagggagttcgacccgcggtggcttgcgctctcatggtcggatgcatctccaccagagtgcaatggcaccgtcaagtcactgcaaataaactgttagtgcatgcatgctgaggctgtgttctggccgaaagagccatacctgttagcggtatttcgcggttgaagtcgacccaccatcgtcttcagacagcgattggttttaccaccccttctctccccgtgccaacaaaggcttctcctactctgctagaaacttgtgaactggaagcgctttcgccgctagagcggactcccaggccaggcgagtagccagtggtcgtttcaatattcgcctgaaggtttcgcgagcgcaggcgtcaggaaacgaaatcgcaacgagccccacacactcatacgccgcaacatgagggccctccattcatccgctagaagcctgcagggtccgttggtcacttgaaggtttccagcgcaatcggtccggctgcaaagtcgacgcaatatttcgcgccgcaaataggcgcaacggccacacaacgcattacttcttctgcatgggtgcgcagggggtttctcgactagcgttacggcaacgaatgcaccttgaacactgttgaagcacacacactgtgccggtgctacagcaacgggcgttgccgttgaaggtgtgccccccccccccgtgtgtggcggctgggtgctgccgacacaaagaagctggcgatatcatcattcatttttttttaaaaaatggaaaacacttgtgccaagaaggagggatacaataccgcacagtggagttatttttctccctgtactccacaaatatcagtaatcggcatggagacctaaggcaaagtaggaattttgtttgaaatccgcgaaagaaatctataccttttttactatgcgtgtcagtaggcaaaatgcttacgtggtggatgccggatgctacacagcccccttgatagagccatttacggcaatttttcaagctcctcgaaaacgtccttctgattcttgtagtacgctttgtactgcctcgcaattgaagcctcctgtttggtgtacttggtgctgaataccgccccgacgatcttctttggcttgtatccgatctccatccaacggtcgaactggaacccctgcaactgcaatgccatcgttttcgcacccttgatttttttcgcagcttcgagggcccgagccacgatggcgtcatcgtatttggtcgacgttatgatagtgttcatcagcgtcgtttgctgccggggattgttgtggttccacacattcacgtaatccactagtattcccagagccgggttggtagcgcatcctcgtcgagctttagcaccttgagtagctcagccggggattcgttcgcagaggaccacctccgaataagctcttttcttaatgagttcgccaacgactccgtactggcatacctcgctccacgcccaataatctttgcggcagtggcttgatcgtagttccaaatcaacgtttcaaatatcgagactttgttctctggtttgagcttgttcatcttctccacatcggccacccactccttcatgatcggattggcgaggagatcttccactccatcgtccagcttcagtaccttgaacacttcgtctgcgtgcttactcaaatcaacagctcccctctcctcgctgtcttcatcgtcgagctcatccgctgtgtcgatacccctcagtcttctgttggcggctgcgccaacttcatctctctcccccacagtcgtggacatcgacgtagcatccgcgctacatacagcaatagcagcggcagcagcgaatagcagaacgcaacgaagcctcatggcgagttggtctgccgcgaaaacttgagatgtggcggctaggatgcaaattgcaaagtgaactgctctgaggtttgagcaaaagcctctttcatgccgagatgaatcccttgagtctacggaatccgtagtacggatgtagggaacgtgttgttgtgacttgtgacgcaccggatgcttatcactggaaggggaatgactttgctcttgcatgagacggaaaccatgggcatccaagtcgagttatctggtatcgtcttgctgcgctatactaatactagtgtacactactgtattatacgtatgtgttggttctggtgcagcggctgttacggacagcacgcacaatacctctcctccatcccagagcgatttggccagtcggtgtgcgtggtggccactggtgctaagccgacttgaaatccgaacgacgtattgactacttctacttgtaactacaggacaacttgtttcggacgagtccaggacgagtaacctgattcgctgaagaatacgatactctgcaggcacctgcaggttcaatggtggaggagtttgaaaacttgcggcgtacgcatatgcatgcatgtatgcagtctccatgatgactattttaaaccggattatgcgtcaagtgcaccggaaaaggataatttgtggaagtcactcaaatctaaaagaaccgctacagatagaaaggataaagcaaagggtccaagcgaaagttatagactccaaagcgcattttaaaatatatatgtatatataataggacttttgctcctacgtaaggtgtcataaaagttagtaccgaggacagtaaaacctggtacaaacaaaactgaactgagcgaatggcttgcgaaggtaggccgacaagtcagcgccttcagtaccgttatagctgtagcacatgtacgtaactccacgctcagcacggtgacctggttgcggtgctgcctgaggctccgcctgtacgagtgtggccgaactaggtatgcattggccacagatgctttcaggcgcactggcctaatctagtcctacgaaggactcgttagccctacgaaggtccaaatggccagcttaacttggccattcgggccttgtttccaaaaaggtaccctttagatgaagacggagctcctacgtaggactttcgtaattcgatgcaagaccaacagcaaatcctaggttgagccctaccccctccttctcaagaccacctttttgaggtcagattggccaaagttttggaaaggcacaatacgtaggacctcaaatcggagagcgttttggcagaaaggcacaatattaatacaccgcatccattttctgtccaaactaatcgcaggctgtggatgatccactggatctgtattcgcggatatccggacggaatcgataacagctctacacgaagatcacttatcgtggacgcttgtgactcacagacggcgagtctaggatggcaatactttgatacgtccctgtatttggagaaaacctctggagcctaccatagtaccagtggtaccacgcctgcgtgtacttagcacaatttcgctgtaagcggcaagagtacatgttgtgaatgtcgttcaaaggcctaactcccaagcgctagcgtgttaatgaagtttagcgtatttttcacgtaagacgatcgcggcagcatcgccacactcttcaacagaggatgttaccgactgtaagcttagttttgctgacttgaacagtaataatcctctcatatgtcatatctaccacctctgataggcgataattgtgttccacacaccatttcattgcacttccaagcagtgcaagaatggacgaggacgacgtctacgcctccatcttggcgcgggtggggcgcccggagctggacaggcagctgcacacagtgctgcgcaaagagtacaggtccattgggcgccaggtcgatcgcgtgtcgtcgtctctagccgccgcgcggcagctgcaatcggcggcggagttcctgagaccgagcggcgactggcagcccaagacgctgcaggcgcagctgaagagcatcgaacagctgcagagcagtctggagacggctctgaacgagatagagaggaggacgaagaagaagaagaagaagagacagaggaagcgaattgcagaaagagaagaagactcggagcgtaagacgaaagcgatggagaaggagaaacttcgggatagagaagccatcgttttggatgatgatgacgacgaggaagccgatgaattggccattgtggagaataatgcaagtgcaaatgcagaggaggactctggagtggagttcttgcaggtggtgacgcctgcggacagggccgcggatgtgaggacgggagacgctgaatgcgaggagaatgacgctgtgacggttgagaagcgttgcagaccagtcgatgtgattgaggtggaagaagatgcttgtgaagtggagattttagaggtggaaacgaacgacgaggggatagaggaaggtggtggactagagtgtgtgggagatgaaggtggtggtgtagagtgtgtggaagatgagggtgcggtattagaatgcagtcccgaaggcagcgacggaaatggagagacaaacgaagaggtagaagcattgccgagcggattgatgagaagatcgcgcgacgaggccgtccgggtgaaggaggaagtaatagaccagcaagcaattttgaaagtcgaccgacaagaggcgtgcgagggtgcatcagtggatggatcggaaacggagtccccgatggagctggaagttccagagtcgtctgaggagtcggcagtggagttggagatgtcggattcagaacaattggcgatggagttggaggtgtttgattccgattccgataatgacgacgatttctcgctgtgtcgggagttggtggataaacttcagaacgaaagcgatgccacccaccagttggttgtgtttccacaaactgtagcagtactgcgctcgtacctgctcgaccgcaaacaccttgaagtggacgaatatttatatgcgcacaagaccttcactgacggggagttgacggaaatgggatgtgctatcgagacaatcgcctctgtgggcatggatctgccgagacaaccacgagtcaagatggcactgaacgacttacttacgcttgttgaacagcttgagcacacgctgggcgagctgccaacatgtttggatccgtacgtttgtgtagttttttgggctgttggggtttcagttgctgacgatgtttctgtttgtttgtgcgcaggattgtagagaagttgtcgagttatttctcgcttactgtaaagaagaagtcacctgaagcagagcggtaaacattgagtgttatgtaagctgctagataaacatactgtacacttgaagtatatatgtccagcagtattgccactcaattaaagcgcagttgtgtctaaggtaacttgctcggctaagcgtgttgattagttatgctcgggttgcttctaagatctataatacgtaacactagctgtccacggagtacgagttcccgggctgcagaagcagaccagaagactcacccctccacttatttggacttgtgtaccaccacgcggatgttcttgccgttgaacgggtacccatccatccgcagcgccagcgtcatgccctccagcgcagcaaagcggacgaccgcaacacccaccgtgctgccgtcaggcatcgtaggcatctgcaccgacacgaccgcgccggcaatgccaaagtacgacgccacatcggcctccttggtcgtgccccacggcaggtccgacacaaagacctcgtacgtggcgtcactacccgccgcctcagccgccgcgacagccgcagccgtgcgctccaccttgaccaaaaagtccgagtcgggggtcgtctccacacgctgcctcttcacacgaggctcctccacctccacgccgttctgcgacgcatacgccgcccgcttcttggtcaacagaccgcttgacgtcctaaataataataaagcatcccgtaaataaaaaaatatccacatgaccaaccacgtacaatagccaacgcacctgatatactcgtcaatgtcggcatgcacgcccgccagcttcttgagcaccttgtccatcttctcgagcgtggactggttcgtcagcggactcaataacacggccgagatgaggtggtccagcaccagcaccaactcattgcgcagcgccttgtcggggccggcaaaggcgtcgtcgctgatgatgcccgccaccgtctccacgtccgcgaagttcttgtcgatccacgcgtcgctgcgcttgcgcgtgatgcggtgctggatcttggccagcagcttggccacgcgctcgcggctctgctgctcgctctgcttccgcttgtcctgggccggctcactggcgtcgtcggcggcggcgggcggcgcctgcgcctgcagctggcgctgctcgtccacgaagcccttgaggtcggcgctgaaggccgcgtacttgcgcttgatctcggcgcacgtggccgcgttctcgcggctcagcggcacgtccagcttggccacggcctgctgcaccttgagcgcctgctccacgctctccagacacgtctgcatgcgcgcctgcaggtggcggagctcgtcctcgatggccgacgagcagtacgagcgcagcgcgtcgccgcccacgcgcgccaggatgcgctcgaacccactcatggttgctgtgcactatgtatgactggaagtggtggaagtagcgcaggtgtacccaggaaagggtacagtagaagacgcattgtgattggcggagggtttgcaccaatgagacggaagctgcagtttaggggctggttgagttcttggtgtttggtgtcggtgttggggaggcatgacataaacatgcaacacggtttgatctgattggttgaaatgattttcaatggtgttaaccgcgacacgactcccggagtcgtgttggggccaacaccaacagaaaggacaggcatcccacacaaaattaatggatttctgaaaagccagaaatggcgcggccgctaggaacgagatcgagtgagcgcatggggcccggtaaacacgtagaacggtagcggggcggctagtgcaggggcttctgtacacgagcttgtggttgtttgtcttgtttgggggcccagaggtgctgccatcacttcctaaaatatcacccgaaatactcagaatgagctgctttcccaaaaacagggacacggacgagctaaccaatcaggtaggggtaggagggagtcaaaggcacacagtgtgccacacaccagacaccaaacaccaagaactcaaccagccccttataggacggtcatgaccatcgtgtcgtgctgccggtcggtcacctggtgttgtgtctgtaggactgcggcagcgagcacctgcggacactttggtgctgtgatggagaatagaacggcgaatgtagagacactgatggcactttgagataatacctagcaacttgcaatagtctacttaaggcccgttctcaaccggccgcatgcggccgcaccgcatcgcacagttttgtacaatgcggctgcatgcggccgcatcggttgagaacgctcgtgcggccgcgccctacccgcatgagcttccagatgacatcggccaattcgaactcaagcataccaaaagcagcaacgcgaagtatgatgagttttgccgaagactcgtatttctcgatgctagctcatacaccaactgaaaacaatatatgaacaagtacttgtacgcctgtagtggattaatgctaaatagaacttgttgtgtttctgcatattgcaaacatcttcagcaaaaacctggcgcagacaacaataaggaaagcgatacaaaaagatctactacgctggtcaaccagcagtgtgaagaaaaaccgtccacctacagcgatatggtggagctactcaatgagtggatcgtcaacttatgctacagaagctacttgtaagttaaccccaccagtataatgaagaaatataagtgcgtaatcttttgctgcacaaagcaaaatagtttcctttagcgtagagcgcgtgtagcttcaaaatcgatggccgatttagaaatttttaacgagtttccgtttcattacagtttttgtgagttgccttgcattcttgctgtttggttttaatctactggtacgtcggatacgtattcgacatactcacattttattttagtgctaaacctctgttgactcaaataaaaagctctactgatgccacctaaccgtgcctttcgcctcagcacgccttcgccgatatcgtgcgggcatggaggtatacgttagctcgcttgaaagcccaaacatcatggttggctgtggatatgggctgtttgtcatcataaatcaagtaaagttagcaaggtctcgaatgcataacaacaatcatctccataggcactacagccgaattgtttggcccctatatatggtatgcacgtgctggtaactgtcggcagcagtcgcagctttagtttttgtctcacggtacacgataacatttaactctcacgcacacgactccgtcaaccgatgcatgttatgactacatgcatattggctgatacataacttccactcgtagggcgatacgctagtgtatgttgatctacgcctgctaaagagcaggtagacgtagtacacgcttcccggcggtgggggttctacatctaaaggtagtttccactacctgcaacatgtatctacttcgaaatagatgtaacattacacgttctgtacgatgcactcaataataacacgaaatcgtgtacatgtaggccagatagagtagcggcccccctttgtgttggcgtccgctagcaccagcggcccgaacacctcgagtagaagctaaaatacaaggttgacttctttggcagtcaaggagtcaaattgacgtcttgtcagctgttgtctgatagggtactgtaccagcaggtgagtcaataagagcactctgattggtgctacggcgtgcaacccctactcactctcgtgcggcgacttcgccgcatgcggccaactcgccgcatgagcgcctatttttgcatgcggccgcatgcgaccacctaccccactaaccaatcacaagtccttatttcggctcatgcggccgcatgcggcgaggaattccggttgagaacgggcctaagtatcctacagaacaactaacttgcagtcggtccggagtgttacagcacgtgatcaggtaggtgactgcgacggcggaagagttggcgctgaaccccatccgataggaacggacacggcacgttggacgcgtccagcagagtgagttttctacagtcagcaaacgactaacagaaccgctccaagctgatgattccgacggcaccagcccagcccttcctccgccaaagcacgacgagttcagccaactgctctgctgattgatcaccactcgccagtcaccagacggcgagggcagcctcaaactggggctgggtttcaggcgccacttggtgcgcgttccagctgcaccttcgtcagtcgactctcttctacccctgaataatattcagtgaatatcgcggcacggttggggctggcctctctcttgccctgaccgactctcctctccatggtctccactctcagaagcattcattcgagcccccgctcaatgcgaaggaagcttcacacttctctgcgttcggaacatggcggcgcgtccattagcgcgtctatcggctctgtggctagtgagctgcgccgtccactgtgacgtcgtggccgccacgtgcgccgctgggtccacgacgctcacgaccgaggactgctcgggctgcggcgactacgacttgtgtctcggcttcacggacgcctcgagctgctcgggctccaactgcgagacggccggcgcctgcacctacgagtgtctgagcgtggacaagagcgcggaggagctggtggtgctggtgcagttcggcacgtataagagcgagcaggagctggcggcggggggctacaccgagtccgacttggcgggcttccccgaccagacgagcgactggccgtccgtctccaacaaccaggtcacggcgctgggcaagatcagcgtgtcctctgcagtcacgacgttgtgagtcggtctcgagggggtatttcattttggttggtagagttagttcatctgacagtgctggcggtgtgtggtggtttgctagtattgtgtcgggcgggagcgcggcggtggagtaccccaagggcaaggtctcgagtataattctgtcggcgaatgtcatttcggccgcgacgtccgtgaccaaggtggggctccagaacctgggactggccaaccagatcgacaccatttcggcgtttatcccgtcgtcgattgagagtctggaccttagcaatacgctacttaccgagtttcccacagcgctgagcacgttgcaagtgctcaaggagctgtaagttattattcggagaaaggtgctgtcatgttgctattaactgttgctacttgtttgtttagagttctggataacaactacatgacgacggtggattccattgaaggcgttgactccatcacttccttgtaaggaacactttgtgcttggctttttgtaggacaaaatatttaactttcgactgtgcccttgccctcgtcacaggagcatgcagaacaacgacatcgataattttaccgccgtcttctccaagctggaaaaattgtacgtgctgctgtcgtctagttacccaggtaaagtaggtccgagcttacaaattatgttactcatgttgacgcaggtaccttggaggcaataatttgacgagcatccccagcgccatctacagctattccaacctgaaaaagctgtacgtgcacttgaataacgtagctcaatgtcaatgctataacgatgtctcacacgctgtttgtgatgcatacgcagaaacctgactggcaatccgctctcatcgcgaggttttacaaacgatcaggctgaattcttgaacagtttggagacgttgggactatctgagtccgactttagcgccgacgtggattgtgacgacacgtaccaaacgaagattggagacgccaccgtgtgcattaccgatggagtaccaactactactgacactacgagtgctacagccagcggtgcgacgaccacgtcaggctcggacggatcagaaacaaagacagcgagcacatcgtcatcttcgtcgtctaccagcttgatcgttgggatcgtttgtggagtgttggtggcggcatttgcagcgttcctcttcatcatccaccggaggaaagaggaaaagaagatcgagtgctcaatagcaagcgataccgtcggatacagcagcgaccacttctcgtctacagacaattggcaccagcagctacagtcacgtggacgattcactttcgatgacgttgatgtgatcattccgaggggctccagcgatgtttctttgggggttccgactatgactcacgagaacgaagtaatcactgaagaagtaccaggggccggcactgccgtttccagtattccttcgtttgtatcaacagaggaggccggctcgaaggaaaagccgcagagatttatgnnnnnnnnnnnnnnnnnnnnnnnnnnnnnnnnnnnnnnnnnnnnnnnnnnnnnnnnnnnnnnnnnnnnnnnnnnnnnnnnnnnnnnnnnnnnnnnnnnnnnnnnnnnnnnnnnnnnnnnnnnnnnnnnnnnnnnnnnnnnnnnnnnnnnnnnnnnnnnnnnnnnnnnnnnnnnnnnnnnnnnnnnnnnnnnnnnnnnnnnnnnnnnnnnnnnnnnnnnnnnnnnnnnnnnnnnnnnnnnnnnnnnnnnnnnnnnnnnnnnnnnnnnnnnnnnnnnnnnnnnnnnnnnnnnnnnnnnnnnnnnnnnnnnnnnnnnnnnnnnnnnnnnnnnnnnnnnnnnnnnnnnnnnnnnnnnnnnnnnnnnnnnnnnnnnnnnnnnnnnnnnnnnnnnnnnnnnnnnnnnnnnnnnnnnnnnnnnnnnnnnnnnnnnnnnnnnnnnnnnnntttgcgtcatgcccgtactatctaaactacctcgagctcctgtactctatcgtgttgcacacggcatgcttagagtctaagactcttagactctaagagtcttagactctagagccctccagggtttcgactggtgcaggccaagatcatctttgctttgaacagtagaccccctgcaccaaatgaaacctgcacttccaggaccttcgagcctcggttttggcgcgccacctgtctctgagcattttcgctagacgccactcctttgcattgtcttaagattggcaccgcagcgaacttccgagcttcgagtgcgggctcatattgcattagaaatggtggcagtgctttggcttcggcatttggcgtcgttgggaatcatttgggctcttggcttcaacgttgtgagcgccgactgcgctgttgggtcctcgacctcacaaccgaggggtgttcggcttgcgacgactacgatctgtgtcgggggttcacctcagccggcgactgcttgggccccaactgcaagacggacggaaactgcacgttcgagtgcttgagcgtcaacaacaattcagcaacgttggttgtgctcgtggagttcggcgactaccagagcgaagaggaagttgcggcgggagggacagcgattcggacttggctaattacccggacgagacgagcgagtggccttcagtgtcgaacaaccaagtgtcctctttcggaacgatcgagttgtcttcgaaagtttcaaccttgtaagtgaaaaaaatgactttgctgtatgtttagcaaaactcgaattaatctggcttgtgtgttttgcgtgtagtattgtatcgggtggaagcgcggtgtcggagtatcctaaaggcaaagtctccaggatatggcttacgtctgggtttatttcgttggagatggagatgaccaaggtggtgctcagaatctcgacatggggacgcagattaacctgctcccagattatctcccatcgtcggtcaagactcttgatctcagcaacacgctgctagcggcatttccgacggaattgggcgatattccatcgctccagcgattgtacttgccgcttctcactattatttgcttaattgagcgcactaatggtttgtgctctggctggttagactgctggactacaactatttaacaacactggcaagcagtgacgtgatcgaatctatcaccactctgtatgttggaaacatcatgacccggtacattattgcgctttagaaatctctgctaaccgtattgtgcttcgatgcaccattgtaggagcttggagaacaacaatattgacactttcgagagtgtttttccatcactggagtacctgtaagaaccgcattgaagcgtttgtgggaaatttgactgacttcttgctataatattcagatatttgggcagaaacaacttaacgagcatccctaccgccgtctacaatcactcaaacctaaaaacgctgtacgttcatgagttagctattctatctatcattgattttcggttggtcactaacgtgtttcaactattgtgttgaagaaacgttgctgggaacacattttcatcgcgatatttcacgtccgaccaagttgcatttttgaataatctgaatatgttgggactctctgactcggacttcaaagtcgaggtggggtacgatgacgcggagcagagtgcaatacacggtgtgaagtgtgtatacgagatggaaacgcttcctcatcgacgagtgataccgcttcgtcctcttcatcaagatcaactcaagtggatggcttagactcgaaagtattcggcacgtcgaaggatcgatgaaccaaagtgatcctgggcgtcttgtatggaacttccgccgtggtgatcgtctgcatcatccttaccgttagtatgcggagaagcaaaaagcttggtccgcgtcgtacaagtgacattgaagagtacgctggggatcaatcaccttcgccagaagttggttctcaagagctgatgaaatctcacttcgggctgaagacgttgagtatttacgggaaggagatggcaagccaatccagtaatttttcgatggatatttcaaattcgcgcgaagatgacgggggcgtggatattccagtactcgaggcgtccaccattagcagtacgtcgaagtatccctcttttgtgtctacgttggagaggtcttccaagggaaaatcagacagattcatgtcgatttggaacgactatgaacttctgtcgctgcaactttgcgctgcgtctatcaaggatgttcgcaagattggcggcgggggctacgccactgtgtggctagttcgctaccgaaaccttcaacttctcgcctccaagcggcttcgatccgataattacacgcagaagaccactgcggccttcgtggaggagattaaactcatggccaacttcgctcacccgaatattgtcaagcttattggagcggcgtggacaactgaaagcgacctgcagatgttgttggagtatatggacggtggagatctccggagatatttatcagacgcgagtacgcctactggctggacgtgccataagttcggctttgccattggaattattgaagtgctcgtgtatcttcactcgttcgtgcccccgctgctacatcgcgatctcaagtcgaagaacgtgttgctatcttcggatttcacggccaaattgagcgactttggcaggtctcgcttctgttcagacgatagtgctatgacccaaggagtgggcacgagccgatggttagctcccgaggtgattcgtggtgacagcgactatggatgccccgccgatatctacagtttcggcgtgttgctcacgaagatcgacacgaacaaaatcccatacagcaacgcgcggggccgcaacggcaagcttctgtcggatgatactatcatgcagcgcgttggcgctggtagactggctcccaaacttcgacgtacttgtgaccaggcgctgagggatttggtggagcgatgtcttgctcgggacccactcaagcgaccaacggcaccagaaatcgcgagcgaattgcgtgtcgttcatcgtgagatggcgaccagtctatctaaacgcgcaccgtggacaaccgattttattggacgtggtgtgaaacaatcagacaggtcttccgtaagtctatgaatccattcacgcaaaaggagaaaatcccgaaaaaaacgtgtgtgtgggaatacacaatattaccttgaagttttcttttcgcgttgatggtacacggagcactttagatactcgaattggacagagttcccggaaggcagttgtccccggtagctgatgttaactgattttggcctatgctctcatccatcttaaatccgagacaagctcgagtgatggagaacatttcgaaaacttcgatcagcgggccgctcatcttctacaactacgactaccagcagcaagctgtatgtgctgctccgtttgctgtcagcgactaaaacctcggtcttgatagacttcctcgagtaacagtccgttcgcatccgataaacacgactgcgacgccggcggcgagcttttcgtctgtctaatacgactaacttcgacatcagcggcgctgtccgcgccgccccgttcattttaaacaactacaactcggccacaatcggctttcacgactcggacatcggcagcgggatttacccgactacatgttcaagttgagctgtgggctgaacgtgccgctccgtttacctacaaaaacttcgtgtcgtccggccacttcgactatgaccacgacagcattggcgtgtggctccgtccgctttggcggctacaaactcgggtcttccgcctccttcgactacaatttgacctgcgggctgtaggtgtagtcacgctcgcgatctcgactacgaattcggcggcgagctgcacgcgcagtctcggcagtcgtcaccgacttgcggcacgattcgatccgtttgctttgacacctgcgagatcgggttgctcgacttgtacaactacgacttcagcagcgggctgtacgtgcagttccgttcgcttttgacgactaccaactcgtcgaacgttacggtctctttcaacgcttacagcctcggtgtcctccgtctactacgacttgagcagtggagtttcgcttacttccgacggctacgaacccgttctcgtccatttcctccaactacccaccactacaactacaactataactacgacaggaaagaatgcattaatttgtaatggaaacgcaaatttacataccgcagatactgtagataacacgtaagtagtagctttcggagcttcttcatgcaacgggcgactttgtttctcgttgaattgttgcttaggcgatagcgatagtgacggcgcggccgcggtggagatgcccgcattaaaagttctttagctatcccagcctacacatagctctcgttctgaaacaccgaattccttttgtcaaggcacacagcctcatctagccaatcgtagagctgtattttcgtttcgggaaattttgtttgcatgacgacatttatactgggataggaagcggcaaagtgctgatagtacagccctcccaatcgacacgtcttaggtcaatttacagaagtgacgtcgattgaccgagtgttctcaataatgatggaggtccagttcatttgcaaattcgattcgttttattgatgttgcgctaaaatcggttgtacgtcatgatcatagcggtaatacattgtcgggcaggagatgtccgtggagcgtgcggtttgcgtaaatataccggtaagtgcaagcgctttcaaattttgattctttggcgcaggtcttactaacatgactggcttacaccctactgttatagacacgcgaccctgcgtcctatcacctagtgcatctaatcaaccatcactcaccggtgttcatccaatcatcctactcgtcgaatcatcggtggcgtaaacaacttaccgtaatcaccataatcaacgtgggttcggattggaccggttcgggttaaccggttaatgggtacaactggtacacagtacccaagaccagcaaccctcaatacgccccctcaatgcgaagtcccacgaatgccgagagccaccgtcagataggggttggccagcaattacgaattatagtcaaaggtccgctccggagtccaatgtatcaccgtcgttagtggaacgctagaagatgtagttcagaagtaacctgagctgaataagtgaccctaaatagtgcgaatgattcgagcggcggttttaattaggatgcttgaattaatcgatagagaactttagttgttggaatatctccgggtttggaacaaggaaaatctggataaaatccagatagattacggataaatttccagcggatgttccaataaccaagtccacgaccctcgttgttccactggaatatatttttagaccaagtcagttttgttcaaaactaaagctctctagtagcggtaaatccattcccaacacattaccgattgtaccggtacttgaaatttgcatgagatcgactctttataccgaaattgtatgacgaaaatcggcacctaagctatatcacggaatcaggatgtatgccttgacaaaaggaattcggtacctgtgcagtaatgtagtacgcatgtgacacaaacaggttcatcatcctgttccgcgttatggacaaacttgtcatcttgtttgcgttatggaaaacgcaaaaaacaaaagcttggtacagatatcgcaaattggatgacgcacccgagtaaggatgtttgcttcaagcaatttgctgtcatcccatttgcgttattccaacaaaggtgcgacacaaaccgtgtcgttgattcgcagtgcgtgtcgaacagaaaaatattgagcaggatcttagacgctatcccggatgttctctaagatttttaacactaatacaattggtgccaaaccagggatatctttgagatcgaagccatatatctacaggtatttgtcgcaattcagtgtccatacagtcatgggatgggatgcaacggggacttggccggctaactgaccccatgcaatgctctggaaagccttctgtctggttgggtgctcactttggaatttcttctccagctctcaagtctccctccacctccaacaatcgtcaagatgcgcctcgctcaagttgtggtcgtcatcgctgcttccttcctggttgccactgacgctctttcgaccacgaacgcaaaccaggccaagatcatcaaaggaacgtcgcccggtggccacagcccacgacttctgagggcctaccaacctgatgatgaaggcgattcccccgaagataggacgctgtcgaaagctcaggtgacaaaaatccttaacaaactaggcaaagatgtcacctgggaccacgtcatgcggaacccggctttgttccaaagataccagaagaaggctaacaagatcattgagaagcaaaaggcagcagcgaaaaacgcgtagccgatcatcaacggcgaccacactccttagttttctctccagaaactggctggccgctcgcgattgccaagtgctaaaacaaaagcaacatgtggaactgcagtacttcagcgcacctcgaggttcgtttactgaaaataaaacgtctatcccacgatcactttgcatacagtaggtattggtgctcgtgtacatcagcaagccacgcaaacgctgtagctgcataccaggcaattcagaagcaaggccacgtcggcttcaggggatcttgttgagtgtgaagaacaaagcgagcagaaagccacaatttcgtggttagctggatgatggtcaaggtaatacttatcgtactacattgccgatacagtaagcagtagcgagaaggcagacagacatgctgtcgcctacagtacaacgctcgggctctgctgttccgttccgctgcacaaaggaaggtgccatttttttaaagattggtgcttgccatgattatttttgttaacgcgaggtaggtattataatctctaacctgataatctcaatagcaatttcgaaaagggctatcgttattttcaggttttcggatggccgagctcgaggcggagcgtgtgagcggcttcaagcgcatcttggtccgcctggacgagggcacgcgccgcaagtactgctgccgcgcgctggaggaggacctgcagcatgtcaagagccgcgtgcgcgtgtgcgcggaggccatggcgcaggcgcggcaggtgcaggacgcgacgcgcaagctgcatgccagtcagcgagcggccgtgtcggctgagctgctgggggcgttagaaacccttcagactcgtttagagacgaccacaagcgcgctcattttgggtcgcgcgcccaaaaatggggcgcaaaatgggcccgaaagtgccgtaaaagagaaaactaatgccccattccaagaggccaagacgcttgcgaggctggcgctgctgagtcaggagctggacgatgtggcgagtcagatgcgacggctggagaagctcatgccgcccaatatggcggagctggacgacaagcagaggaagtggtggaggaagcacgtgcacaaactcggagaccatgtgctggagctgctgacgggacacgagagggagaaccgggctctgttgcgccttgagaagacgctcaagaagatggagaccaagtggccggaactcaagagctggcacgcgtacgtgacagtacttttccttgcaggaggagtggcaactgaaaaaaaaaattaatttttttttaggaatttgcagaagcagattgctgaaaagcaagggtcgaagccggcatcaggagctcctgctgaatcaactgcgaagagcaagaagaagcgcgcgatcccattgccggatgacggcgacacggtgatgacgagtggttcaacagtgtcggcaaagtcgacgaggaaaacaaaggatgctggccaagataagagcaaggggacggacagtcagtcccctgataaggttcgggctctgctgctgcgctgcgcgaaggaagtgcggacacttcgcgacaagttcgagctgggcgcgtacgacgtgaatttgagtcgcatggtgaccgtcgtggactcgctgtgggcaggagccgagcagtccgaggttgtgttgctgactacggcgctgtttacgctggtggagacggtggagaaagttgtgcatcaggccaagcgccgagaccgcctgcagtgcctgatcagcgtgctaggtgtcgtgctggggtctccgaagctgcaactgactgatcggcgaaagacgatggtcgaggaatacgccaacaactgccgccagtccctcaagcagttgaatcggcagatggagagtggaagccacgacgctactgccagtgccgctgaggagacaacagcgcaaaccccggttggaaccagtgcacaagcgaagatgtctaacgagcgatcatggcccaaaactcatgtacgattcagttaaggagcttggatgctgagtagaatagagcgctagaagacacaaacactcccgcacttgaataacgtagctcaatgtcaatgctataacgatgtctcacacgctgtttgtgatgcatacgcagaaacctgactggcaatccgctctcatcgcgaggttttacaaacgatcaggctgaattcttgaacagtttggagacgttgggactatctgagtccgactttagcgccgacgtggattgtgacgacacgtaccaaacgaagattggagacgccaccgtgtgcattaccgatggagtaccaactactactgacactacgagtgctacagccagcggtgcgacgaccacgtcaggctcggacggatcagaaacaaagacagcgagcacatcgtcatcttcgtcgtctaccagcttgatcgttgggatcgtttgtggagtgttggtggcggcatttgcagcgttcctcttcatcatccaccggaggaaagaggaaaagaagatcgagtgctcaatagcaagcgataccgtcggatacagcagcgaccacttctcgtctacagacaattggcaccagcagctacagtcacgtggacgattcactttcgatgacgttgatgtgatcattccgaggggctccagcgatgtttctttgggggttccgactatgactcacgagaacgaagtaatcactgaagaagtaccaggggccggcactgccgtttccagtattccttcgtttgtatcaacagaggaggccggctcgaaggaaaagccgcagagatttatgtcgatctggaacgatttggaacttctgtcgctacagctacgcgcggcagcgattaaggacctcaaacctcttggtactggagcctacgccaccgtttggctcgttcgctacaggaatttacagcttctcgcctcaaagcgactgaaacctgaacgacgcaccaagaaacacacggccgcgtttgtggaggaaatcaagctgatcgcccgcttcgaccacccaaacctcgtgaagctcatcggagcggcgtggacagttgaaacggatctgcagatgctgctcgagtacatggaagcaggcgatctccgtcggtacttggcggacccggatacccccagcggctggacgaccgttaagttcaacatcgcgatcgatatcatcgaagcgctcgtgtacttgcactcgttccagccgccgctagtgcaccgtgacctcaagtcgaagaatgttttgctctcttccgatatggaggccaagttgagtgactttggtacgtcgcgcttcaggtcttccgataaaacaatgacaggaggagtgggtacaggtcggtggttggcccccgaggtcatccgtggcgactcggactacggcccagcagtcgacatctacagctttggcacgcttctcaccgagttggacaccaaccagatcccgtacgacaacgtccgcgcgtcaaacggtaaattgatgtcggacctgaccattctgcaccgagtggcgactggaaggctgcaccccaagcttcgatccacgtgtgggaaggcgttgagggacctggtggagcgatgtctgcttgaagacccggccaagcgccccacggctcctgccatcgcgtacgagctgcgcgtgattcagcaggacatggcttcgacgacatgagtgtgctgggttttttggttggtggttggtggtatcggtgagcaatttattagacgcggtgcaagttgaatgcggcgtgcgtgtgaagtaaaggaaggaaatggaaaagtacaaaatctactgaagttgatcgcggtggtttgatactgcacggcactcacgaaagcaagtgcatgtcgtgcttcaccgaaaagcaaagtaaattggcaccagtttacgctgcgccatgcagacagcatgacgtccttgcacaagagcctcgacaactttacatgttccttgctgcatccacctcgctttcaacaacgggagaccgcagctgtttctgcaccgcataacttacagacactttttcatcgatgactcgtggtactcgaagtactatctcggaaagatcaaatgcgcgtgctgtatcgacggcatcgaacaccaagaaaactacactgtgctgtagctgcatgccaggaagggctatcttaaaggcgctgcgtacagtgtacgccgtacacttatcgcgtgcctcgccgtaggacaaggcccatcatttgcgagcctcgaatggcgtgatctcatgctacgtggtggctcaattcagacaggatttgcgtcatgcccgtactatctaaactacctcgagctcctgtactctatcgtgttgcacacggcatgcttagagtctaagactcttagactctaagagtcttagactctagagccctccagggtttcgactggtgcaggccaagatcatctttgctttgaacagtagaccccctgcaccaaatgaaacctgcacttccaggaccttcgagcctcggttttggcgcgccacctgtctctgagcattttcgctagacgccactcctttgcattgtcttaagattggcaccgcagcgaacttccgagcttcgagtgcgggctcatattgcattagaaatggtggcagtgctttggcttcggcatttggcgtcgttgggaatcatttgggctcttggcttcaacgttgtgagcgccgactgcgctgttgggtcctcgacctcacaaccgaggggtgttcggcttgcgacgactacgatctgtgtcgggggttcacctcagccggcgactgcttgggccccaactgcaagacggacggaaactgcacgttcgagtgcttgagcgtcaacaacaattcagcaacgttggttgtgctcgtggagttcggcgactaccagagcgaagaggaagttgcggcgggagggacagcgattcggacttggctaattacccggacgagacgagcgagtggccttcagtgtcgaacaaccaagtgtcgtctttcggaacgatcgagttgtcttcgaaagtttcaaccttgtaagtgaaaaaaatgactttgctgtatgtttagcaaaactcgaattaatctggcttgtgtgttttgcgtgtagtattgtatcgggtggaagcgcggtgtcggagtatcctaaaggcaaagtctccaggatatggcttacgtctgggtttatttcgttggagatggagatgaccaaggtggtgctcagaatctcgacatggggacgcagattaacctgctcccagattatctcccatcgtcggtcaagactcttgatctcagcaacacgctgctagcggcatttccgacggaattgggcgatattccatcgctccagcgattgtacttgccgcttctcactattatttgcttaattgagcgcactaatggtttgtgctctggctggttagactgctggactacaactatttaacaacactggcaagcagtgacgtgatcgaatctatcaccactctgtatgttggaaacatcatgacccggtacattattgcgctttagaaatctctgctaaccgtattgtgcttcgatgcaccattgtaggagcttggagaacaacaatattgacactttcgagagtgtttttccatcactggagtacctgtaagaaccgcattgaagcgtttgtgggaaatttgactgacttcttgctataatattcagatatttgggcagaaacaacttaacgagcatccctaccgccgtctacaatcactcaaacctaaaaacgctgtacgttcatgagttagctattctatctatcattgattttcggttggtcactaacgtgtttcaactattgtgttgaagaaacgttgctgggaacacattttcatcgcgatatttcacgtccgaccaagttgcgtttttgaataatctgaatatgttgggactctctgactcggacttcaaagtcgaggtggggtacgatgacgcggagcagagtgcaatacacggtgtgaagtgtgtatacgagatggaaacgcttcctcatcgacgagtgataccgcttcgtcctcttcatcaagatcaactcaagtggatggcttagactcgaaagtattcggcacgtcgaaggatcgatgaaccaaagtgatcctgggcgtcttgtatggaacttccgccgtggtgatcgtctgcatcatccttaccgttagtatgcggagaagcaaaaagcttggtccgcgtcgtacaagtgacattgaagagtacgctggggatcaatcaccttcgccagaagttggttctcaagagctgatgaaatctcacttcgggctgaagacgttgagtatttacgggaaggagatggcaagccaatccagtaatttttcgatggatatttcaaattcgcgcgaagatgacgggggcgtggatattccagtactcgaggcgtccaccattagcagtacgtcgaagtatccctcttttgtgtctacgttggagaggtcttccaagggaaaatcagacagattcatgtcgatttggaacgactatgaacttctgtcgctgcaactttgcgctgcgtctatcaaggatgttcgcaagattggcggcgggggctacgccactgtgtggctagttcgctaccgaaaccttcaacttctcgcctccaagcggcttcgatccgataattacacgcagaagaccactgcggccttcgtggaggagattaaactcatggccaacttcgctcacccgaatattgtcaagcttattggagcggcgtggacaactgaaagcgacctgcagatgttgttggagtatatggacggtggagatctccggagatatttatcagacgcgagtacgcctactggctggacgtgccataagttcggctttgccattggaattattgaagtgctcgtgtatcttcactcgttcgtgcccccgctgctacatcgcgatctcaagtcgaagaacgtgttgctatcttcggatttcacggccaaattgagcgactttggcaggtctcgcttctgttcagacgatagtgctatgacccaaggagtgggcacgagccgatggttagctcccgaggtgattcgtggtgacagcgactatggatgccccgccgatatctacagtttcggcgtgttgctcacgaagatcgacacgaacaaaatcccatacagcaacgcgcggggccgcaacggcaagcttctgtcggatgatactatcatgcagcgcgttggcgctggtagactggctcccaaacttcgacgtacttgtgaccaggcgctgagggatttggtggagcgatgtcttgctcgggacccactcaagcgaccaacggcaccagaaatcgcgagcgaattgcgtgtcgttcatcgtgagatggcgaccagtctatctaaacgcgcaccgtggacaaccgattttattggacgtggtgtgaaacaatcagacaggtcttccgtaagtctatgaatccattcacgcaaaaggagaaaatcccgaaaaaaacgtgtgtgtgggaatacacaatattaccttgaagttttcttttcgcgttgatggtacacggagcactttagatactcgaattggacagagttcccggaaggcagttgtccccggtagctgatgttaactgattttggcctatgctctcatccatcttaaatccgagacaagctcgagtgatggagaacatttcgaaaacttcgatcagcgggccgctcatcttctacaactacgactacactacgacaccagcagcaagctgtatgtgctgctccgtttgctgtcagcgactaaaacctcggtcttgatagacttcctcgagtaacagtccgttcgcatccgataaacacgactgcgacgccggcggcgagcttttcgtctgtctaatacgactaacttcgacatcagcggcgctgtccgcgccgccccgttcattttaaacaactacaactcggccacaatcggctttcacgactcggacatcggcagcgggatttacccgactacatgttcaagttgagctgtgggctgaacgtgccgctccgtttacctacaaaaacttcgtgtcgtccggccacttcgactatgaccacgacagcattggcgtgtggctccgtccgctttggcggctacaaactcgggtcttccgcctccttcgactacaatttgacctgcgggctgtaggtgtagtcacgctcgcgatctcgactacgaattcggcggcgagctgcacgcgcagtctcggcagtcgtcaccgacttgcggcacgattcgatccgtttgctttgacacctgcgagatcgggttgctcgacttgtacaactacgacttcagcagcgggctgtacgtgcagttccgttcgcttttgacgactaccaactcgtcgaacgttacggtctctttcaacgcttacagcctcggtgtcctccgtctactacgacttgagcagtggagtttcgcttacttccgacggctacgaacccgttctcgtccatttcctccaactacccaccactacaactacaactataactacgacaggaaagaatgcattaatttgtaatggaaacgcaaatttacataccgcagatactgtagataacacgtaagtagtagctttcggagcttcttcatgcaacgggcgactttgtttctcgttgaattgttgcttaggcgatagcgatagtgacggcgcggccgcggtggagatgcccgcattaaaagttctttagctatcccagcctacacatagctctcgttctgaaacaccgaattccttttgtcaaggcacacagcctcatctagccaatcgtagagctgtattttcgtttcgggaaattttgtttgcatgacgacatttatactgggataggaagcggcaaagtgctgatagtacagccctcccaatcgacacgtcttaggtcaatttacagaagtgacgtcgattgaccgagtgttctcaataatgatggaggtccagttcatttgcaaattcgattcgttttattgatgttgcgctaaaatcggttgtacgtcatgatcatagcggtaatacattgtcgggcaggagatgtccgtggagcgtgcggtttgcgtaaatataccggtaagtgcaagcgctttcaaattttgattctttggcgcaggtcttactaacatgactggcttacaccctactgttatagacacgcgaccctgcgtcctatcacctagtgcatctaatcaaccatcactcaccggtgttcatccaatcatcctactcgtcgaatcatcggtggcgtaaacaacttaccgtaatcaccataatcaacgtgggttcggattggaccggttcgggttaaccggttaatgggtacaactggtacacagtacccaagaccagcaaccctcaatacgccccctcaatgcgaagtcccacgaatgccgagagccaccgtcagataggggttggccagcaattacgaattatagtcaaaggtccgctccggagtccaatgtatcaccgtcgttagtggaacgctagaagatgtagttcagaagtaacctgagctgaataagtgaccctaaatagtgcgaatgattcgagcggcggttttaattaggatgcttgaattaatcgatagagaactttagttgttggaatatctccgggtttggaacaaggaaaatctggataaaatccagatagattacggataaatttccagcggatgttccaataaccaagtccacgaccctcgttgttccactggaatatatttttagaccaagtcagttttgttcaaaactaaagctctctagtagcggtaaatccattcccaacacattaccgattgtaccggtacttgaaatttgcatgagatcgactctttataccgaaattgtatgacgaaaatcggcacctaagctatatcacggaatcaggatgtatgccttgacaaaaggaattcggtacctgtgcagtaatgtagtacgcatgtgacacaaacaggttcatcatcctgttccgcgttatggacaaacttgtcatcttgtttgcgttatggaaaacgcaaaaaacaaaagcttggtacagatatcgcaaattggatgacgcacccgagtaaggatgtttgcttcaagcaatttgctgtcatcccatttgcgttattccaacaaaggtgcgacacaaaccgtgtcgttgattcgcagtgcgtgtcgaacagaaaaatattgagcaggatcttagacgctatcccggatgttctctaagatttttaacactaatacaattggtgccaaaccagggatatctttgagatcgaagccatatatctacaggtatttgtcgcaattcagtgtccatacagtcatgggatgggatgcaacggggacttggccggctaactgaccccatgcaatgctctggaaagccttctgtctggttgggtgctcactttggaatttcttctccagctctcaagtctccctccacctccaacaatcgtcaagatgcgcctcgctcaagttgtggtcgtcatcgctgcttccttcctggttgccactgacgctctttcgaccacgaacgcaaaccaggccaagatcatcaaaggaacgtcgcccggtggccacagcccacgacttctgagggcctaccaacctgatgatgaaggcgattcccccgaagataggacgctgtcgaaagctcaggtgacaaaaatccttaacaaactaggcaaagatgtcacctgggaccacgtcatgcggaacccggctttgttccaaagataccagaagaaggctaacaagatcattgagaagcaaaaggcagcagcgaaaaacgcgtagccgatcatcaacggcgaccacactccttagttttctctccagaaactggctggccgctcgcgattgccaagtgctaaaacaaaagcaacatgtggaactgcagtacttcagcgcacctcgaggttcgtttactgaaaataaaacgtctatcccacgatcactttgcatacagtaggtattggtgctcgtgtacatcagcaagccacgcaaacgctgtagctgcataccaggcaattcagaagcaaggccacgtcggcttcaggggatcttgttgagtgtgaagaacaaagcgagcagaaagccacaatttcgtggttagctggatgatggtcaaggtaatacttatcgtactacattgccgatacagtaagcagtagcgagaaggcagacagacatgctgtcgcctacagtacaacgctcgggctctgctgttccgttccgctgcacaaaggaaggtgccatttttttaaagattggtgcttgccatgattatttttgttaacgcgaggtaggtattataatctctaacctgataatctcaatagcaatttcgaaaagggctatcgttattttcaggttttcggatggccgagctcgaggcggagcgtgtgagcggcttcaagcgcatcttggtccgcctggacgagggcacgcgccgcaagtactgctgccgcgcgctggaggaggacctgcagcatgtcaagagccgcgtgcgcgtgtgcgcggaggccatggcgcaggcgcggcaggtgcaggacgcgacgcgcaagctgcatgccagtcagcgagcggccgtgtcggctgagctgctgggggcgttagaaacccttcagactcgtttagagacgaccacaagcgcgctcattttgggtcgcgcgcccaaaaatggggcgcaaaatgggcccgaaagtgccgtaaaagagaaaactaatgccccattccaagaggccaagacgcttgcgaggctggcgctgctgagtcaggagctggacgatgtggcgagtcagatgcgacggctggagaagctcatgccgcccaatatggcggagctggacgacaagcagaggaagtggtggaggaagcacgtgcacaaactcggagaccatgtgctggagctgctgacgggacacgagagggagaaccgggctctgttgcgccttgagaagacgctcaagaagatggagaccaagtggccggaactcaagagctggcacgcgtacgtgacagtacttttccttgcaggaggagtggcaactgaaaaaaaaaattaatttttttttaggaatttgcagaagcagattgctgaaaagcaagggtcgaagccggcatcaggagctcctgctgaatcaactgcgaagagcaagaagaagcgcgcgatcccattgccggatgacggcgacacggtgatgacgagtggttcaacagtgtcggcaaagtcgacgaggaaaacaaaggatgctggccaagataagagcaaggggacggacagtcagtcccctgataaggttcgggctctgctgctgcgctgcgcgaaggaagtgcggacacttcgcgacaagttcgagctgggcgcgtacgacgtgaatttgagtcgcatggtgaccgtcgtggactcgctgtgggcaggagccgagcagtccgaggttgtgttgctgactacggcgctgtttacgctggtggagacggtggagaaagttgtgcatcaggccaagcgccgagaccgcctgcagtgcctgatcagcgtgctaggtgtcgtgctggggtctccgaagctgcaactgactgatcggcgaaagacgatggtcgaggaatacgccaacaactgccgccagtccctcgagcagttgaatcggcagatggagagtggaagccacgacgctactgccagtgccgctgaggagacaacagcgcaaaccccggttggaaccagtgcacaagcgaagatgtctaacgagcgatcatggcccaaaactcatgtacgattcagttaaggagcttggatgctgagtagaatagagcgctagaagacacaaacactcccgctgcctctgggtactgcaatgtacctatgacttaccgtcagtgtctcgtgttatggacaaagtgaagaagatcttcaagttgaaggcgtacttggtgcggatgctgtcgcccttcccagattcccagcgacgacggagtgtgctccgagatgtaagggccaagcggcgcgcgagatcaacatctgcgaagagctcgtgctgactgagatgatattcgaatacgtgctggtgagcctggagcctgaggaaatcgtggcgatctcatcttccaggcagcaggtttgctgcaaacggcatgtacacgggttaaaccggcgacccccgtgacaatgtgctaccctgatttttttggaacaactataatacatgtacgtattcgcctggatttgcacgagtctctgccttaaagcaagtaaataaatataggggaaaagtatgatgctgttgcttagccactgcacttagcataccactcggcacatttaggtaaaatgggatacgaacgtataatagcacaccaatatgttaccgttcggaaccagttcaaatttgtgctaacgttattaatacatgtagctcttaaagtaatagagacctacatgttgctagttcgggactcagtattcgtgaagtggctcgcccagaaagaactaatacagtagttatacacactgtagttacatggcatctacgtgataccgagtagacccttcgctcatatttacctcgcgagcactttgtataacttcgtttctgggtacttttcatacgtgagatatctttgcaggcacggatcttctcggcattgatgcccagcttgccgcttatatatatatatatatatatatattgaggaaaggaggcctctcgaacgaacatcttattcttcatctttagcaacccagtcgttgcccttcaaaagttgctggcgctgggcgttggaaaggaagccgccatcagcgaccagctcctgagagaggcatatcttgtcgttcgccttgtaaaaaacttaaagcatggaccttgagaaacaattcaaggcgagactgataccgtacggtatgccaatgcgaacccgttacatcacctttaatgcgacagcacaatagcaccgttaaaggcgcctaagccttaggcaaaggcgcctttagtttagcagctggttttcaggtaggaggggaatatctagactgttgcctcagcttgcctaagtccaaaacgggcacactgcgtagcacgtaagccgggacctgggcacacttttagtactgcctacttcatggggaatatgtaagagctatccaacgcactaacgtgcatcggcagagtgtcagtagccgcttagcaggacgtccgtctcctcagggtctccttcttgatgctcattttcaaagccatcaggcccggaggtcatccctcctcaggtggtccacactttaaaggcgccgtgaagttaaaggcgcacatccaatctgtgcaaaatctttgtaacgttatggttccgaggtctcatatgacgacgaaagcataattcacattatgacgactacagtaaaatctacattcttgcataatgtttcagtaccagtactagtattagaataacaatttgcctttttgtttaggaacgcaacgttttcgttagcataatttttaatattttaaaagcatttagggaatacaacgctctgagcaaggggttacattgtatatgtctacaaaaagcatacgttatgctatttgtgtattgtgtatccacttattgtgctcttcaccaattctgtcagtcgattaggctcgctaattcaacgtcaaatctcagaataatcattaagcgacttgcccaacgatgcacgagcgaaaagctcgatttacttaaagtaagcttgatttacacgagaaatcgtggattggctgaagcaaatgcaccatttttaatgataatcaaagactaagcgacaacctgctacagaatgacagccgataccatcgaagcgagggtctttgagttatggtaaaacaacgagttacgatgaagttaaaatacaaaacaacgatgtacgcctatgtttagacagaatgggagcaaagcacaataaatgagaaattataccattgagcaaccaatatgacagccttcgcaagtgaattcgccaattttaacctaaattataccgatcaaacctttccagatggggttaaaaatagaatatatatttatccattatttattattgtaagtgctcaatgcatttattgatgattgcccaatgggcgccttccaaaaaggtcgcgcataaaatttaatcccggagaattgtttgatgagaccactttttggtctcatcaaacaattctaatgcgactcttaaactagcaacgtgattaaacaagtgactgaactccactatactcgaaggtcgcgttccagcaaccgttttggggcgcattaaacgctctggtaatttaaaataaattacggattaaactgatcaaacggttttatatgggttttggaaggcgcccaatgtaatcaataatattatactttattgtaatgtccgagcactgagtataaccactaaattgtactgtgggaaacgcgtacaattgtataatccaagagatttagtgatgtcaaattggcatcactaaatcgcttggacattgtcagtgcgaaaggaaacgaaaatacgtactagcagtataacaagtaggtagattgcaaggcagagccaactaccaagtacgatttggttaacaaagagcgaagtagaaatgaaccctcgtgcaatgtccttactgatcatagcgtctactccagcattgcttccgactaggacaggtacaaactgctggcgaataccatatcgcgaaattgcccgtctgactcagtcgtactgttgttccgatgttgtcttgagcttttttgtcgtcttctttttcttcttcctcgttgagcaaagcacaggtatccttcttctctgttctcactttgaaatttacttttcaaccctcaagttctctactccaacaagcgccaagatgcgactctccctcgattttgtggtgatcgctgcgtccttccttgcctccagcgaggccctctccacggcgaagaactgcaaagaggccaagatctctaaagaggcttcgccggcaggccccagccagcgacttctgaggactcaccatcggattgctgaagatgaagaggactcctccgaggagaggggcctcacttaggcgcaaatagagaaactgaaggcttttgctactaacaagctgggtatggattggacgagggcccagcaaagctcatcgtacctgcaaaggcaccccgagtaccaccggtaccaagccaaactcagcaaatacctcaagccaaacaagaaccacggccccccgagcatcacctacagagagcagtattagtttctgctgcctgcttcacaagtgtcgagtccagaacatgtcaactggaggtaggagcgcgcgatccagatttttttcgtctaaaaagccgtatagacgaacaaacctagctaagaacttacctgtaactcagtacttgagcgcctgccctgcaatcacaaaacacttcttgtctctaagcgttcgacccgtatggagaacagcggtatgtcgtctgcagttgttcaccaagaaaaaaaaggttatgcctttgaacacgcttgggcaacggcgccacatttaagattgaattcacttcgtgtcttacaatatctaggtgcgcgcacaggaaggagagatacacagctggattcactctaagcacggactgaagttggtaacgatcagcgctaagtagtcgcatacttctgactgcgttaggataggtacaagctgctggcgaacacgacatctcgcttgatcgcctcggaggcgacctccatcttgcggtacagctgcggatcaccgatgacacgagcagcgttgcgcacctcgcgacaaacttcgtccaaacgcgtaatacagcgcacaatcgaaccttcctgcacgtccgtgagctcgcacagctgcttgaacggcataccccgcgcccactcgtacacaacctccatcaaaccaaagttgagagctcccttgcaatacactgcagggtcgatctctaggtgctgctcgagctggatcaatccaagggactcagcgatgttcttgaccacctcgcgggtactttccagcgttggggtcaacgtaggctcggactgtgatttctcctggaagatcagcgcagagagcacagccacgatctcctcgggctccaggttcgccagcacgttctcaaatatcatctccgtcaacacgagctcttcgcaggtgttgatctcgcacgccactcgacccttaacctgcacgacgccgtccttggaaatgtacccgagccgcttcagcacactcagtcgctgctggaaatccgggaagagcgaaagcgaatcgttcgacaactcacgcgtcatccgcactaaatacgccttcaacttgaagatcttttccactttacccatgacacgagacaccgacggcgaatcagtggcacacggatgactgaccaccatcgagtgcatctgctgccactgcgtgtagcccgtcgcgacttccagatcattaaccttaagctcgcccatcaagtcgacgtacgcgatcgcagccttctgtgttgtagctgtatccttctccagctgtgccaggaattcaatgctgctggcgagctccttcttcgacgatgaagccacgagtgtcttggtgttaacgcttgaggctacgacggaggttacgctttcaacgcagctctcaggcacctccagcacggcgtacttccttcctagaagcgtagcagttgatggcgccgagagctcactggtttcttgactttcagacttgcccttcttgcccatccgcccaaacatgcggtcgtcgtcgtcgtccttcttgctgcgaagcatgcgtcctcctccgaaaagtgtgtcagggttcttcttcgtggtcgatgccacctctaccttaggaggttcgtagtcatccggacagagagtgatcaccataatcgacttgaatactcccttgtggcttgtgtcggtagagcttgagctctgaagctcggtttcaaacgaaagcttcgaccgagcagtccctccctcgctaaccatagcagagttggtacgtacgaccagcgccaactggtcggacgaaaggcccttgacgttcaaaatcacgactcggcccggtgctatcgcacttttagctgcttggatattgtttgtcaggagccacttggtcagctttttctccagttcacgcttttcacgcttcagctggtagaattcctgcatctgtgcaagctcgccgctagcctcgaggtgcgggtagtcctctacgagtgaccgttccagctgctggtgcaacgtcttgcccttttggatcagcttagggatattcttcgacgccagcgccttttgagtgtggaactccgagaacgagcgcttcatcatgtcttccaccgtcagtacctccactcgtaggaggttcaagatcatgttgtaagtcagacggaactgactagagagagacgtcgcctttcctgccaacattgtcctcaatgaagtgggttcggggacatcgttccagcacgcgatgatgacggtaccaacggaatcaagaccacgacgacccgctcggccagccatttgcgtgtactccccgggcagaagatcgcggaagttcttgccgtcatgcttacgaatgccgttaaacaccaccgtacgcgcaggcatattcacacccatggcaaacgtttcagtcgaaaacagcaccttcacaagaccgcgaccgaacagtatttctaccatctccttgataatagggaggagacctccgtggtgcacaccaattccccgcttgagcatttccttcatcatcagcacctgtgggagctcgcggtctgatccctggagtcgctgcacactcgtctcaaggaaaagatggatctctgatctctctgacggggtgctgaggtcaagcttcgccagcttgttcgcgctctcctcacacaaccgcttgctgaaagcaaacacgaccaccgggagcagagacttgtccttcaaagtgttgatcagcttggtccactcaccttggtctcctccagatgtacgaagggtacgtgcattggcgctgctaccgccaccgcgagccacagctcttccgcctcgacctccagccttcgacttatccgacgcagggaaaattttggccttggctgcaccgtgggcattcggtaggtatccagtggtggcatcgtacagcttgaataattccttgccagcatagaggaagtgctggaggggcacgggccgcttgtaagtagagatcacgtgaatcttctgcttcttcgtgcgtccaatccagtcggaaaactccaagtggttcggcgtggttgccgagaggaacaccatgccgatatgctcgggaagcatgataatcacttcctcccacaccactccgcgctcgctgtcgttgatgtagtgaatctcatcaaagataacccactcgatgtcgcggataatatcagcaccccgatacagcattgaacgcaagatctcagtcgtcatgacgaggcaactcgcctccgggttgatgctgacatcgccagtaataaggccaacattgtcggggccgaacttggtacggaagtcgcggtacttttggttcgacaacgccttgatgggcgacgtgtagatggtgcgagtcatgtgcttctgagacatcgcgatcgcgtactctgcaatcaccgtcttgcctgcggaggtatgtgctgccacaaacacgcactcgtgccgctcgagatggatgacacactccttctggaacacatccagctcgaagtcgtacttcatggccatctccggcaccttctcgtggaagttgcgcacatcgacactcgccatgctggcccactcggacgtcgggctcgttcgcttctgtaaggtgagcgctgttgactcggatgccgaatccaggatcgactccagctccatctccggatcctcaacgctaccatcagcttcggaggctccttctgcagccttaccaatcttcggatcagcgcccactgccactgcgctgctcccagcctctgtgctatccccacttccatcccccttcgcgtcctgttcgtcatcttcgaccgaaaagcccaattccatgagttccccatcgtcctccatctcgcgcagcagttgatccagtacgaccgtcgtgttgtcatcgttctgcctcatggcgttcgccgccttctcatccagcacggcgctcctgatcgccgcgacgtggtccctgtccgccaccgcttcaatgtagggcttcagcagcgatttggggttcacgccgaccgtctccacctcctgcacaacctgctgctgctcctgcgcctcgaccttcctcgcatcctccgccgtcaagcatccattgataccaggaacgtcgaacaccaagctctcgagcaacgtttcgtccagctcctcttcccgctccaacacgagccggttcctgtcctgctcctcctgcttcgtgagcagcctctgcatgggcgtcatctcgtcttgctgcgtctccgtctgcagctcagccaatgagtctccgcccggggagaagggcttgttgctcatcttgccgcgcgcgtactcgtcctgcttggtcagtgcactactgaatccggcgtctgcgccgctcctggacacgtccacgggccggaactcgtaccggatcttcagggggctcttgacgatggacgcgcgctgcgggacgagctcctgtcgcggcgcagacatgggcatctgcgccaacaggcggctctgggggacgtcggagtcgccccagccgcgagggaacggccccagccgctccaacgcgaagagcgggtgcgctacagcctccagctccttcttgagcgtcgacgggtccgcgtacggtgacgtgaggcgcgcgcgcggcagcgcaaagggcgaggaagaggagggtgatgaagacttatggggtacgatcagcaccgcctcgggggcgcaggaggacgccgagaggacggagaattggtccagagctgcattggccgatggagagggagagggcggagtggcgctggatgcggcctcctcgttcagccgcgacagctccgccaagatgcgctccaccgctggaggggccatgatcttggtggcgtatccgaaagtgtaacccgagtgtgtaaccggttatgatttgctggcgtaaccgaacgttaatttgcaacggcccgttactaacggggttatatatcgagttaatacatatgtactgtacatgtgcagggttacaatctgcaactgtaaccagttacgtttaagtccaccttggagcgctaatgactgcggcaaccgatgaggacctcgcgctgcgctgctgcgtgtgcggcacgtcggccgaggacgacagcaactacctcaacaccaagatgaagatgctcatctccaaatgcggtcaccgcttgtgcgtgctccagcgcgttgtgtggaagttcttgtgaggaataaagtgtaacccttcgtgccacctctgaactgtcataattgtaattgggcagctgcgaccactgcatcaagcgcgagttccagcaccagcgcgagatcgcgtgtcccgcctgcgagaagcccgtgaagaagtcgcagctgcaggacaagaccatcgaggagctcaacttcgccaaggagacgtcggtgcgcaagaaagtcaccaaggagtaaggatacgctggtataactatagaggggttgttgtgtattcaagctaacatttccgtgtggatcgatcctgttagttacaacaagacggaggacgacttcgacacactggacgagtacaatgactacttggagacgctcgagaacctcagtacgagatcaagatgcttggtttttagggctgaagggaggagagctgaccaattatttttacgttgctgctgtagtttttgatctggtgtatggagacgacaacgaaaaggctgcggcccagaagcagtggaagcagtaccgccaggagaacgccattgccatcgccacaaatgacgccaagaaggccgacgaggagcgccgtatcgcgcagctgattgcggagcagcagaggctggcggaggaacggcgacagctgcagcagcgggaggattcgcagtttgaggcggatctggagcgtcagaaggcgcagctgatggaggtggcgctgggagaacgagacgaaagcgacgtctccaagctgcgcgccacgacgacggctattccgattgaccaggccgtcacggcggagatggaagcggcgatgatgggcttccagccgggagtcattggtggaccgcagcccgttccggttcctggaggcaagcgtggacccaacttcggtgtgaacgagtccaagaagctgcgtcgtcagcagcagcttgccggcggctacgatccggatttgcacttcaagcgcaaccgaagcgaggcgtggtgcggcatttacttccaccccgttgatagaaagaatgaaggtccggctccgatggagatctgctagagcaagcgtgggtatgcagatgagcttcaaggagtatatctataaaaaaatgattgaagcactttggttttcggttaatttcaaggagtagtttgcattttactcactacccggctggcattcagctctgtttgaacaggtcacacccaaatgacctcccgatagacgtcacgtctggcaaaatccaggatgatttcaatgacagcagtcggcaactttcccaccatcgggacgctcagcagggcaagtcggtgctcaatcggtagatcttcataggccagccacttgtcatgatggttcttttcgaagcggtattcgacgttctttacttgcgggtctttgatatccagtgtcattgacaaatgcctcagcgttttgttcttgaacagcgacgaatcgagcctgttcaggatcctgtttctcgaactcgtggggttttcctcaagatgcaggaactgcaagcggccgatagcagcacagtcagtatcgcccaacaagcggaaaagatcttcctgacttgctgcactgatatggttttggacggccttaagcgtgcgcaggatgcagctctcgtctcgaaacgctctggtgatcggtgcaatatcagtcaattcacagccgccaatatctagctccgtcaacagtggacaactacgcagaactgtgtctagcgtgcgactcgcgaaagaattgtcacgcaaatgcagtgtttgtagtgactgcccaacgacttgcagccactccgatagagtacgatcgatcggctgtgaatccaaaagtccaaccagttcgccatctgacccgagcctcaaaacttgcggagctgtcctcacgccgaccattgtaagtgcttgcagataccgggtactaccgttgtcagatcggaactctgttttcatgatcttcgagtttttgacgtaaaagattccatacgcaggaaccatcacacaggtccaagatgctccggattccagcacatgacaccacaaatctgtttcgagttttagcgctggcttcgaccggcaattgacatgcttgcttgactcccgaggaatttccaagcgactaccggcagccaccagagcccactggttcgccccgacatgagagtcatggcgtatttggcgtgttttcttcgggaccagcaatggaccagaatcaggagaccccagaacttcacgcacgagctcaatgtcttcaagtcgtagtacgcaatacgagatgtccaaatgtgtgatttgggacttcgatgcagggtggattataccgtatgcgagccacaaccacgactcgctgccctcgaatccatgcaacgacaactcacgaacacctcgtcggctattagcttcgtggatggccgaaaagagagaggcgatctggaaatggtttagcgtacttgaattcaaggagagtttcgtcactgatgtcccggaaatgtcattaccacctccagataatggtgtcgcaaagcaagcagacacgaattcacagaatgaacgcatgaagcgcttagtcatcgttgcagtaaccaccctgttcagcttgagatcgctcactgacagctcggggcgagccaataattgcgcaagtggggccaaatcacgctcagataccaaagtatcgctcagatccaaggcccgaactttgaagaaaactcgcgtcgaatccgtcgcatgcccccaccgccccgaggctgccttcaacagcgtctccatcccactcgcgcaatgcatcatccgtagtcggctctcaaagaaattcaggtcgatcaccactgtccgggggggttgtggaacgctaattcgcaatctagctagcagctcttgcgcgcgttggtccatatgacgaaatggctcgttgcagtgtggtgaaaaagcttcagcaatgagtttcaggagtgcattatccactttgacctttggaaacaccagctgaaacttcggcatcacgcgtacttcagttgcccttctagctggcgcacagtttggtacctcctggtgacgaccgaaccgtggttcacgaggcagcgagaaaaactcgtcgcagcgaggcgaaccacagatattgttcagcaaatgccaccagaagcgtggctttccacgccacgaatactctgggtagcacgccacaaggcttagaaagcgaatggccactaacttgtcgaaagcttggggccaaggggaacaccactaactccactcatacaagtttcctggactgcacgtcgactgttgttcttggtactggtagggacgacagtgctggcgcgttgagcactgccactactttggtttgggctagcattacgggtggcactcccggtggtctcagttcgaaaggtgattgctatccatggaacaggcagcgagagaccatcgcttggttcggagcttggagcttggctcggtacgagatagacgctcccctccagacacgcacagacatcagcgacgtgccgctccatcggactgctaggacgcggaggcgctcctctcgagcgtggccgagtcatgagcttccgggaacgctttgctttctgggtgggacgctgcgagcatatgtatcttcgattttgtatggacctcatcttcaaccggtgaaccaatccacgtgcgtcacgacagactcaaagttgcaagctgcaccgttggttcatcgtgcatcacacccttgctatattatagtagcctttactgatcaacgtcgctgcgtacgtctcactccatgagattcaggtcgctctcgtccactgggactttgtccatggtcgtctcgttgagcttgccagccagatcagctatgcgctttggaataccctgagtagctcgcagagctgggtgagaagcaatgagctccagcttatccgctgagttggcagcgcgcgcgtgcttcagttcttcaactcgaatcggccggctcattagacttaccagcatcatcgttgcgctcttcatgtcgaatttcgacagcgtgtataacctctcgccgtggccgtggacagcgccatccgtgcagattgatgttcgcgccgtcaacacgatcttcagcgaggcgttgttggtcagcaggtccgacaggaatgcgcggaagcgatcacggcgagcgtcattgcgtaggagatagtcgcaaccatctaagaccatcagcatctgctggctattgaactcgatccgctccttgtgctgttttaagtggtccgtgaccatgatctctagccgactcagcacgcgacacctgccgttcgcgatgttgatgtttcgccgcatcatgccgacatgctcgtccatttcgtcttgagcaagcctggcaaccgaaaagatgcgaacacctccctcagaagtgatacgaggcccaacgtaattcgccaccgcgtgcgcaaccgcagtcttgccgatcccttcctcgccgcagatagtcacgaggcgcgtaatgcgagactgggtcatcatcaaagccaagcagattttgtatacttcgacagagcggttgcaaaacccttggcacatcgcaggcaggtcgtcgaaccaaagcttcgggtatcgcttcgacttcatgggctcaaggttgacagtgttactggattccacaaccgccaacgggaaaataatctccgagtggtcgccatcctccggaagcagcatgaacttttcagcgactgccatgggccctcgaatattcggcgacttcgcgacagactgctgagctatagtgaagcttgcccccacggacttgcccgtagcgagggccaagtagaacgcacgcgtgaactcgatagctgcgtagtcttcgatcttctgattcgtacgcacgccaataacatgagggatgccacacgatacaaatgcgtacgctagtggtgctgaggagcatgccgatacaaatacaagacgtagtgtcgactcgcctcctccaccacccgccgaaaacagttcttggagacccttgtgagggatcggatgcaccagtcccatgccgtcctcgaagtatagatgattctcgtcgccatgaccggagaagtgaagcgctcggcagccaagcgtcaccattgcccggaacgtgtccgtgttcgcgaacttggctaccacactaatttgccgcggacattggtatatcctggataacgtaccaggcccgttgttgccggatgcatcattaattgtagctggtctcttcgcaaacttggacgcttctatcagactcttctgcaggatcgagtattcacgcttgacatccagttcagcgatcgggtggtacttgccgtggatatctttcccaaccagcggcgccgagaacagcacacccagcgtgtactcctgcagattcggtccttgctgcgatttatcctgcgagtccgctaggatcgctgactgattgttcttggtcccttcctgtgccccgcgaacatgcgggtcctccaccacgtatcccagcagcacattcccctgtcttgacgacagcaacgtaatcttctgtccgtccatcagcttgtacttcttgttcttctgcacctgtactccgtcaatcctaatcccattcgtgctcttgtccgtaataaacacagcgtgtctgtgggtctccgggtccagcgccgtctcaataatgcaatgcgttctgctgagcttcacagggtccacgcccgacgtcttcttgtcaaaaatgcccgtatagttatctctcccaagggttactctgggcgtgagcatctgcatctcaatgcgatacagccccttcttctccagcgcgttcttctggaacgcagtcaccgctctgtccacctcgggatgcagcaaaaggcgcatcagacacagcgaggggctgtcctccagcgtctgcgtgcactcctgcgtgttctgctgcgagatgctcatggcctccatgaggttctgcgagtcttcgcgcaaggcctcgaactgctcctccctattgtccatgagcgccttggtgtccctcccgaggctgctggacgtcgtgcctctgttgtcccccacgccgccgatcaccaccgtctccggcagcgcgtagggcgccactcgcgagcgtttattgggcaggccgtgcagctccggctcctgctcggggtcgcgcgcgctgcgcgcgccccaggacgacgacagcgtggacgcggaggacacggaggacacggacgagaagctgccgcccaggcgcgagcccgcggtctccgccgtgaacatctgcagcaccgagggcgcgctggagcccgccgaggacgagcgcaaggccggagagcccaaggctccgggcggcgcgcgcgtcacggcgggcgagaggccgcccagcgcgtccacgcggcgcttgcggttgccgttggcgtcggccagcagcgcgccgccgtccacgaaggggcgcagcggcgtcgggcacacgcccttgtcgcccatggctggcggtgagtggggtgacgtttcccctcgggagtgcggaatcgatagtggtgcgtttcccttttggtgcggatcttgaagcgaggtgattggctgaaatattggcgaatggaagcgcggcgacagaagctgcagtaggccatacatttttcaagagagaagctagaggggggaacacgattggacggccatgttgaagtgcgctgagacaggatggctacaatggagactgtgacacagtgtaaaggccgcaaagtaccaagagcaccggtagccaaccgttctagttggcagcatggcggcgtttcatcgttgcgcgactcactccacgttgacaggcatcactgctataccttaggtttgttggtgcaccaagcgcctaatagcagggctagagttcgaatagtgtccgatgagcgtccctactatttccatcttgcaactgtgcagcgccgtcttcatgtcatcgcaataatagtaaggtaacaaatcgggattcgcttgaggatatttcttgttttgtgagtgtgcttcatgtgataggcactttcagctatgctgcgcggtgggggctttggaaatccagtccatcgtttcaacaaaaagcacttcaacttggccaggctcaagatagctcgcaccaaaagttcgcaccttgcagttatccgctgatcgggagaaacactctgccagccatcaatctctgctctcgactacacatgactaccagtgggagcatggagagcgcaagcacggagccaccaccgcggtgcgattttaataatgtcgaagtagatgccttaaggaatactaatgatgttgtctttttgcagcgatgtcgtcgtaccgcttgtattggagtcgccgagtcctccccagctcaaacgatcaagggtgctcaccagcagcaccgacgcagctagcgaaactgcaaccaaactgcggatcaatgttgacaaacaacgaaaaggatttctgagcccacatcgactatcaggtaaagactcgaacagctaaattgtagaattattatttggtaaatcgcactaacatcgattttttctcgctacagcgacattccgacacaacgctgaaatggcgttgcgcgtatcattcgcagtggtcatttcgtctatcatccagacgcgggatgaatcgtacgatccgtcgcacgcttacgacaagaaatggctgttctttcccgattggtactacctcggtggactcagctactgcgcgattatggtggtcttctcgatggctttcaacgtcggaggcacgatccgagaagtttgccaagggttttgtggtgtgggtgttgctctcctgtacaattacgtgctgttcactttcattggagtggagcgattcgacagtcacgctgagaacccgtacaagaactactacaaaatcgacaaggcgttcaattccagcgcgtactggataaatgtaccgaacttggtcgcgacgttgccgtggattgtagttttcaccgtcgccgtaatggttctgccatttcacctaaatacacgcaagtatgccgtggggacaaacgcctatttcagtgagtacttcttcaacaatcggctcattaccactacaaccccagctaaccaactgtcgatattgttgttgtgtacgcagctttgacgatcatcaaccccgccaaccctttgagctctggtcagctaaaaagcgttgacgacgaattctttgacactagcaatattttacgcaatttgcggacgtttgcgatcgtcggtgtcttgggtgctttgatctcggttgttacgatgtgcatcccctacccgatcttgtgagtattagtttgtaaacaatgcgtgaatatcactgaggactaacataacttgatccttcatcaaacagtgcaatttctcagctacgtgaggactcaaagaaagcatccgcggatctcttggagctgctaaacattattgtggactcgtactgcttcaagaacaaaaatgtggagaacatggaattcctcaaacttcgccttcgacgcaaatttgacgacgccgaagcccgtcatcgccggatgctgacactacaggatgatgcctggtgggagcagtgtttcgggctgaattacattctcggttttaatcgcgccataagccgcagctacatcaaactggtcggctccctgctcgccgacctacgcaccctgaactatgccatgtgccttgaagactacgggcgtttacactcgatctacatggcagttctaagacgggagatctacatcattcagacgcgaacgaatgatctgctgaacgagatttctcgcgaagtcgacgctttgtcgccccgtaagtacttgcatacactgtatcattaccaagtatttgcgctgatagtttgttttgttttggccaagacctcgaccttaaggcgctaggtgcactggaaaatcaggttgaaatggcgctgtacaagctccgcaaagttcagaaccggacgctacggaaagaagctgtgacgccggctgaagtcgcgggaaacgtgcccctcaacttgtttttgttttccctcaactcattctgcagcacgctcatcaacttccagcagtcgcacaacagcaaagtctacaccgacgtccaccgtgtgcggtccttcttgagaacttcactcaagagattcatcgatccagcgtactataagaaccccatgctctggataaccgcactgaaaatcaccgtggctatcatgacaggcgtcgccttcagcgtgggcgtctacgggttcagcgcatccgttccttcgtgtattgcgtatatcatgggcggacacttgggcacttcattccgaaccacagtgaaccgagtgggcggggtcgtagcggggagcgttgttccgtccgtcttcaagttcttcttcgtacaaatctgcgagccggaagtcttaggcgtcgtgctttccgacatcgtcatgttcgtctgggtggggatgtgtatgtacgtgttcttcggacgcggttatggctcctacggcggcatggtggctgcgttcgttgcttcggacaccctcctgcgccagaccgacatttgctattcaaatggctccgacagctccaactccgtggctgtcgcgtcatattcctatctcgcacaaacatccgtggccgtcgtcatctttatttcggccgagacgttcctcttcccgaagagtgcaatctctttgctacgccagagcattttggatacgtttaagctgcatcaaaaggcatttgatgctttattcggccatcacttgtctagctcagttgagatggacgacgctactatgacagaaatccgcaatatcttgctggtgcagataccgtttaagctcgagtcgcagcgacaattactggtggaagctcaggtcgagccgctgctgtggcgtccgcagttctccgctgacaagtacacgcgggtgcttgaatattcccatcgactgctgaataacaactatttgctgttcaagttgctacgttggttccacttccgagtgacgcaaaaccgggtgaagctaaaccctgcagatattcgcaacgatgtccaagaagatgaaaatgacagtgtcgactgtcacgcgcagtggaagctctcaagtagccacttccagtcgttagtgcgcgacaactttgaaaccatggagatgatcttcagcgacacattccggtactcggatccggatcaaaccgctgtgttcatgcaaatgaaggaggcatttcgtctggcagataaagactgcagtggtgagctcaacgcggacgatgtcgccatcatgctgggaacgatattcgcccagtcgggcgcagtgaaggaggggcagatcaaagcctacgttcaggagtttatgagggtggtgggggaacctggtaggacgacggtatcattcgaggacttcatggacgctatcgagcacgggctaaagctggaggtggaagtctaccgacgggtgaagccacgtgcacctgcactttcatcggacaacttacctgaggaaatcaagaaaattgcgatgaatgaagactcagccgcctgtagccaagaagccagagggaacacgaaggaagaatcgagacccgcttcaatcaccgaaagtgttgctccaattgttggagtcgctcgagaacaggacacacatacaaccagctttttcccgtctgagaacgcgtcggtgttcattcgacgtgagtatgatgttctcaatgtggaggacttctccatttccgacgtcgtggcacacatgaaagctgcatacgtggagtggctccttgcggataagtgcttcgagcgtatttctatggaggaacaattgctgctgaactgtctggtaagtggagctgagagtattgcgaagaacttgtcaggcttagaggagattgcgatgtcatcatcctaaaattgaactaactaatcaaaccagattcaactaaagtcaacgactttcatgcaaattattttattttcactctttctgattagattacagtgacagtgtgacttcctctagttccgtaaggttctttgctacaccttccgcaccactcaccaagcactgcagcagaaactgctcctccatcgacacttgctcgaactggtaatcagtgatcagccactctgcatcagcaaacttcatcctctgtgcaatgtctcttatcgagaactcctccacgttctgggcgtcatgatctcgccacaatagggtcgacgtgtagtcagaagccaacccactgttgtcgtcctcgtcgtcactgtcgaggtgtagcaaatttggagtaatcgttagtgagacttcttcgacgacgacagacccccttcgatccactactcggcgtgaaatactgccttcgatgtactcttgcattgatggcgaagccttgggcttagcgctatccgtgttgttgtcgacatcaatatttatcacgacttcgtcggcgcgatgagcatcgcgagcctccgaggttttgtcatcagcgctccaccgcttgctaccgtcagctccactgcttcgtctaaagctggacaagcgcgacttcattgcatcactaccggctgaagacgttcgagattttcgtcgatgctgcacttccacctcaagtttaagtccattctccacagcgtcagcaaactcttgaaaggagatcgtcggcgtgtgtgacttcccaaccaccgccatgaattccgccacgtagttttgaatttctccttcttttacgtcaaccgaccggctgaacactttctctaacatgcccgagacgtcatccgcgctgagttctccggtgcagttcttatcagcaagacgaaaggcctctttcagctgcatgaacacggcggtttgctccggattggagtgccagaacgcactttcgtacagcttgtggattgtgtcaaacctatcgcgaacagaggagaggaagtggttcgtagagacgtgccacttggtctgagtgctggtaccttcgcctgttcgaggtccgacttggttgtctcggatatcgtgcgagcttagtgcaacgcgcttttgctctacccgcgagtcgaaccagcataccaacttgaacagtaaataaatattgttgagcattctgtgagagacttctagcactcgctcgtgcttatgtcgtagaaatggtcctctccacaatacgggatccgcttgagcgtctcccatgagccttttacgcttcaaaagttttcttggaatctgtacttccagaatatcgcgcacttcatttaatgtatcggctggcatcccgatgcagctggggagatggtagccaaacaatgcatcgaacgccttttgctgcagtttcactgaggcttggatgttccgacttcgtaaactggctgcgctttgcgggaagatgaaagtctcgacaatgataaaaatcacaacgcccacagacgtttgagcaaggctcgagtacgaagagattgctattgcccctggactatcggatccatttgggtaacacaaatcggtctgacgcagcaacgtatcagcggagataaaagccgacaccaatcctgcgtacgagctgtactctccagcgaagcaaatgtacattgacatggatacccacagaaaaattaccatttcagacagcagctcgttcaagaagcttgggttgcacaactgtacgaagaagaacttgaagacagaggggacaacgctgccagccaccacacctccaactcggttcacagtcaccctgaaggatcctcccaggaaattccccatcacgtaagctatggttgagggcaccgtggcactgaagccgacacatgaaccgctagaaatattccagtcgtcatccccagcgtacccttcagagtacccaaccaagtggatggccttgcataacagatcgggtctaggaaagaccgaagggacgaaaccacaaagaccttcacttgccgcgctatatcgcaccccgtggtgttgtgaacgtgctcaaagtgtaaaagtgtggtgcagaatgaattgagtgaaaagcgaaagagcgtgagaggcgcgttcccagccacttcctccaatgttgtcgcctgcgttctcagcgtccgactctgaatcttgcgtaatctgtagagaatcgtctcaagttgattctccagtggttgcgccgtcttcaaagcgatacctttagtaccatgcacgtaacaataagtgttaaattgctgaagttacctaatgtgtgggtggaagtgcgtggacttaccaggtgaagactcacgaaccgcaagtgaaaattcgtcgagacaacgacccaaccaagttgatatagtttcccgtgcccgtgcggttaaaggggataacgaagtggacaccaaagcattgctcccaccacgtgtcgtccagcagcgatgtcatttgccgatgcctagcttcgatagcattaaatttgcggttaattttaagctggagaaaattcatttgctcgacgttgtggcttttagagcagtaagagtcaacgataagtccgagtaagccagcgatctcgtgcgaaactctcatggagcaagcatctagctgttgtattgcgctggatggcagaatatcaccgtaacatttagtcggatgcggcctaagtagctatggtaaatattacgtacatgattgggtatggaagcagcatagtcaacacagagataaaacctccgactacccccacgaccaagtatgcctgcaagtttcgaaggatattgtcaggattgatgatagttaacactacagaaataacaaaatctagttagagaataatgacatcttccgtgatgaaaacacaaaacactaactgtagtaagcattgctcccaagcgcgaacttccgcgtgttgacattaaacggcagaagaagcaccacaaccgtgaagagtatcatccaggggagtgttcttagcaaattgggaaggttgatccaatacgcctccgaattgaacgctttgtggatttcgtagtagtttccgttagggtctgcggctgctatcgaacgcttccacttcgatgaacatgaaaaccacgtagttgtaaacaaacgccaggcctacgccccccattccgcgacaaacttcccgaagtgttccacccagattaatccccatcgagaagacgaccataacagcgcagtagctcaagccaccaaggtaataccagtccgggaaaaatcgccatttcttggtgtgtgcgcctgcaggatcgtaagcttcgtcgcgcagctgtatgaacgaggctaaaatcaccccacatgccgctcgaatagccatctctgcgttcagtcgaaaacggtttgtggatgcacagaaatcagttagaaaggttcaagctaccagcgagatgacacaattcctacgcggtagtcgctgctgtttccgccacttcttgtgtgttctggccgctttcataccactgatcttgtccatacaacatcgcgcaaccttcgacagtcccgactgctgagaattcgcctcggctctcgattccctggtacttgccaaacgtccccatggtgagcacccgcccagctccttactattcatcaactacatcagcaattgagtgcttttggctctccattaccggaaggagcttcgaagtgctggcatcctgtgagccgtccagatttgaatggcgcgtcaacccccgttacgaaaatcgcagtcttctccatttctggggaaaatgcaaatatggcaacacaccagcaccggaatgatgctctagcaaaaagactgcttaccgactgcaccgtcaactttgagcaccgcagcttcattcagcaaaaaaataaaaattaaaaatgctaacgtagcgaaggctgtaccgtccctccaaactctgtgtagattgcactcaagcagtgccagatcatgtccatcttggccatctcgataaacatatttcttaaagttgaattattcgcgcacgcaccaccactggtgctaagtaaacctcaagttgatgttgttgaccgttcgttgagtccatctctgcgtgtctttgtttcagccaatggattgcggtatacgcgcattttcagccaatgtctggtcgatttgtaccgtttccccaaaaccaatgtgcacgctcaaaagtgagcacctctgccagaagatagccatcatcaccccacttttgaatccgcgtcaagcctcccaagccaaagtccaagtgtacacacgtcgcagatttccttgcaaaatggtagcctgggcagaccgcttcgacctggagaagcaggtgacgttctacctgtcctaccacgacaacaagatcaaccagatcatccacttcgcctgcatctggcagatcttcatctcggcgctctgcatgttcgcgtcgctcgaggccttcgccgagccgccgagcttcgcgtcggggctgccgttcggcgagtacctgctgctgaacccgtcctgcgtgctggcgggcgtctacatggtctggtacatcctgctggaccacgtcgctggctcgctgggcgccatcctggtcttcgccagctacctcttcgccaacttcttcgtgcaggactacgcgcccagccacttcgagcgcccaggctggcaggtcgcgctgggcgtgcactgcttcgcgtggatcatgcagttcattggtcatggagtcttcgagcgccgcaagcccgcgctgttcgacagtctggaccaggcgctggtcacggcccccatgttcgtactgcttgaagcgctcttcgccttcggataccgcccgcaactgtacaagcgcgtgtcagctgcggccaaggagaacatcaaggcgttccgagctgcgggcaagacgctgtaagggtgaagggggcttagcgtggttgctagttttattgtgtttgtatttcaagtattgcgattccaatgcaacttcgttactccatattgttgttgccacttatgtacaacgaccatggaaacctgtgcacccaaaccacaagcttctcaagcaagttgctaaattatggatccgcgaagtttgccccaggagatatgtacaacttgccatagctactgtagtggctaccggtacaagtagttaatcagcttctgcttcttctgaataccgacgaggtgctagacaatctatccgagctcattgttttcatggtgagaacattcgtaacgttaaaatcattattttactaaagcattatgtacattggcaggtgcccactggaccagtgttgtttttaagcttttaaaaaagcttatcctagccgataaattgtacgagtcataattctttgctggcctttgggtacaattactcaaaataatgtttttcgttggccccaagaacgcttcgatcttgtcagaagtgtagattggtagatgttgctggattccatacaaccttcgagcgtaatcgtccctgaccggcgcaaggtacatgtacagatcacgaggttgcagaggaagtagtaagttgaatgatgaatgaatgatgtacgtgttcgcgtagccatattacacctgcgctaggctcaacttagctagtcggcggcatagtgtggtgtccacatacgtcgagtctccagtagccgacagcgagtcagcaattccagccatcagagtcttccatttcagtctgtcaccagcaagtgtgcggagtccctcgagatcttgcgcgttccgaagtcggtagccttggccactggctacgaggtcagcgtcaagtacgacaggaagggttgtgcgggggcgaccgcgccattggcctgcttcgctgggggcgtagtaggcagccatttgtgtgtaggcagggatgtccggccgtcggagaatgtgtccaaagagtccccatcgggctgccgcgactcggtggcgaagcggtcgctcgccgcagatctcatacagcgtcacgttcgaaacgtggcgcgggtagcgaatgcccaagaggttgcgaagctgccgacgatgaaaactttcgagaccaaggagttctgaggtagtaagagcccaggtaccgcagttgtagaggagcaccgggagcacgtagcagttgtagagccgtatccgagtcttgtccgtggtgtagtgtgagcggagccaaatcgtccaaagacgtcgtagcgcagccgccgccagtgccttccgccgcgtgacgtcttccgtatcaccgagcaatgagcctatctttcttgtcgagcgccaccgttcttctgccgcgcgggtgagccggttgtggccgctggggagggtgtggcgacgcagttccgtgatctctgtcttgaatatgttcatagtgagggaccagcgggctaggatggcgggggctttgtcgaggataattccgattgtcgcttggtcgcggcagataaactcggcatcatcagcgtacaccaccctttgctcgagcagcgcgtgcggtacatcgagttttctagctaaatcatgaagtgcagcttcgaaatagatcacaaacaaaacaggtgagagagagtcgccttgaggagtgccggaattgctgtccccgttccttccgtcctagctgcagcagctcgacttcctcggagactcagccgccgaaacgtctcgacgaactggtccccctccgacatggtcccctagtcaattccgataggaactaaagtatactttgatctgtcttcctcgactatccacttgtgtcttgtggagaataatagattttatatttaaaaaaagaaattattaacataaatataattttaaataaagtatatatattattattttaatatatatatatatgaacgggtcgagcgtccggcggccggagcgtagggccagcgtcgtgttcgcgagtaggagtcggatgagccgtacgtcgtcgtcggtcaggaatgttcgaaggacttcgagaagcttgtgtctgtcgatagtgtcgaatgctctggacaggtcgatgccgaggacgtgaatgctctcctggtaacgttgaatgcgagcacaaagccatcggtgcgtccaaaccgcatctgcggtgctgcggtatttgcggaacccgcactgatgagccgagaggaacttctccacggctggcgagatcctgttcaggactaggatagagacggccttgcgtatgctgttgagcaacacgatggggcggaggctggagcactaacctcgtggcttgttgggcttggggaggcaaagtaaggtaccgtcaccaaaagtgagtggctccctgcgttcgaagcttgcgttgacgagctcagccaggcgaggtgcgagtacatctgcaccatatttgagcatctcgccgggtatgccgtcaggtccggacgcacgtcgattgttaagtcggcggagagcgatcgtgaactcggaagccgttaccgggcagtcgagcccacgtgcttcttggtccggcaggacggggagtcgcgtcgagatagaaaactgttcctgaacatgggctcgcactaaattgttagctgtacgttcgtgtaggatatacttacctgtagtgtcacggagaagcagcggctgaatgcgcgtacgcgtagcctcgcggactgcttcaaacatttgagccgtgggactgaggcgctcgatctgctgaatcttctcgtcgagggctagattggccagctctcggcatcggaactggatttggtgcaagatagcatttctttctcgacgaagcgccgatgtagcggcttgtcggtcgtggtagatgcggatctggagtgcgcgttgttgttcggtcaaagcggcgaggactgggtcgtcatagcgcttgtacttggtcggcgccgctctgacgccaacggttgcctctgctgtgtcgtggatcaggtccatgaggccgctccattggtgggcgaccggagcgtcatgtgtggggcggagcgccgcctttagcgctgtggtgaacttgtcctgaatggtgccgtcgaagatgaggcgttcccgtgcaatctgtagccgctgagctggtattgggctcctctggaaccggagccggcgagtgtgggtaagaacgaagtccgccgtcacgagtttgtggcccgaggcggtcgtggtgccaccccaggactgggcgtccatagaaaagcgccggcaattttgctggcagagaatgtagtcgatctggttgtagacatggtagtccgtacggcgttggctccaggtggtcttgtgcgtggctctcttacaaaaatctgtgttagttgcgaaaatgcgataagtcaaacaaaagttagccagcgcatgcccattgcggttgcgaatgccgcgcgcgtgggggcccatgaatgcctctccgagcttggcgttaaagtcccctgtgatgactgtaatgtctcggcgggcgaacgggtcgagcaacgacctcagatcagcatagaaattgtcaatgtcgcggagggggcgcccgctgtgtggtgagtacgctgtcacgacgttgatgcgtcctgtgtgcggcataaaaagctggagaactcctacagtaatctgcccgagtaaggaacgcctgatatatataaagacgcagaatatataaattgatgttagttgagtatacttttccaatgtactgatttagttatttcaaaatgaactgaagagcagctttacctacgagtccggaatgattccaacagtggcgtatggtcgaagcactaacctttgaccaggcaccctcgcaccacaacagcgctgtcaactggtcgacctcgtagggattatctagcccttcaccaagccggtctagagcctgcatcatcttaagtgaggcggagacgcttggacggtgtggacttcatgggtggagtgggggaggaggtgggcttgtggggcgaggtgcaaaagcgaaagtgcgagtctaccactacggtacatgtagtttgaagtctagtaagatcgctaaatgcgcgccatttttcaaacgagggtggagagctgatgattggcactggatttttcaccttagtacctcagtaccttgcagtaccttgcacatccccctatcgccacatcgactggaaaataatattaaatatgtgaggctattagttgtacacccgttccttattcgggcagaattctgtatccggtcgttgtgggcccagtatcggtgtaggaaggggcgcatgcgtggcgagaccgcgaagccaactccgtggcgctcttgggtgcctgggagggtcagcagcgtatggtctccgatctgttggcgcccgagtgtcgggagcttgatctcttggaggccgaggatgtcgatgcggtagcggcgggaggtggtgctgggctgatgcggagactcgcaagggacgtgcagatgcccgagagcccctgccggaagggggaggacgtcaccccaaccccaaccaaaaaaggtagtaagttatatgtactattatgaactataatatctcaaatttgaacgaatacacgggtgaagggatagaacgtagaaaatttgtcgttggattctttccggtgccacgatgcagtcagaacgtgctatgggtcaacccgtttggtggtcaatcttttcgttgtgtgcggtctacagtgtagactctacacggagttatgccacgattgaatcgtgacgattcgcgaaccacgaaagagatagatagacgcaggcttacaaaaatccatgaagctttgcatgatagaggaccgagatgggatttgggcctgaattcctcggtcttcacagaacatcagttcgcttttctccggttaccgatgcgtgcccagtacttcctggtggcagtcgcgaccgttctcctcgctacctgtgcgacgctgtcttcggtcaatgccgttcaggtctctccagctgctcggaggcaaggttacgtgcttctgaggagcctggagatgaagccgcgcggcgaaggcgaagaagagagggcgggaggggccctcggcaaggtcgacgacgtggtggccgacattgtcgacgatgccccctccctgatgaagatgttcaagcattggaggacattaaccgctggtgagaagctcaggacggctggcctggccgatctccctgaagaaaagttcatggaggtcttgaagttgtacggactgtacaaagcgctcggatctgacgcgttcttagctcggcaggaacgtatcaaggctaaggcacatccgacacggacataggtaagatactagtacgggtcgtagattcctgtccgcagtagcgcactcccaatattatcattcgtttaattgttagttagaacgctcttctacaaccatcccggcctacttcttctggtggttgacgtaacgcagagacagcagcgccaacactcggaaaaacacgatgaaagcgatgacgatgccgcagttcatccacaagtcgctgcgtttgaccaggaaatccttttccaggtaggccttcaccgttgtgtcgtccgccatggacggaggggttcccgtcatgaccttgcagccaacgtccaagccgtcaccgtcactgggcagtctccaaagacaatggacgacaagatggcgaacgtgtacgagtgcggcgtgatgtggtagagccacttgtagcccgccgggatggagttcgcaggcgggttgtaccccatgaacaggaagaagatggtgttcagcagcatactcagcaccgcggccacctccatgctgggtagaatgtacatcatgaactcacccgtgtacgcttgcaggagcacgtggagcgacatgttgaaccagtagaggaagaacgaatccaccccagtgaagcccacggacgggtagtacactaccatgaacagcagtgtggccacgaacgcgtacgggatctccgccaggctcgaagccaggaagtaccagagcgcattaaagctttgagtcgatcgctcccggtagaacgacgctctaccttcgtccgcaatgggtagaatgctgtggaacgagatgacgcccacgaacgtgatggtcatgtacatcatgcccatgcccgagttgatcccttggtacgaggtgtagtcgctgtcggtgtacgtgatgccgatcacaattcccagtccaatgaagatgaagaagcgcgtcaagttgtacgacgcagtgcgctagtacaagtcaaagaagcgcttggtcaggaacgtcatctgcgtcaggttggtggacgcgcgtttgtcgctgaattccagaggtgggagcgtcggtgacggtcggaacagcccctcccgctccaagttcgcctgcaaggtctggaactgctcgctctgcttgaatatcgccacaaagtccgtcttgtcccgcacgcgtggccgcactggtgaggcgagtcggcattttctcaagtggggaggagagccatcccatatctgtcctgtgattggcttaaaatttgtctggagatggatacatagcgaacgagctgtaggtggagatcaagcaccatctccatctctagtacaacgcgaacaggctctcaggagcggcgatggtgaggccgagttaaggcggaataagctaatccagtctgcgttaggcggaaacagagcgattggcggtttcctacccgccaatccatgccattctgccgtcgattggctctcaaatgctgacaatcttaggcagaattagcactaaataagcgttgatcgcccttttatgactctaattacgcctgaattaacagctcacccgccaaaatacgtgaaaggcacaatagatattttgtggaaaacaacacacgagaagaagatctaggaggaggtagtgaggagacggggtgaaggagacgacaaagcacccgaaaactatggtgcctgcggctgaaattcgcttttccgggacactgaatattaacaccgttacacggataacgacctagagtttgcgttagagctacgtgatgcgacttcacaacatgctttgcaatgtgcggagtcagcccaggtctcagaatttgaagcaatatacgacgtgctccggcgggaaatttcaatttgtatgcggtctttcaccgccgtataacaaccaccgttttgagacttaagattggtcgggtacagtaccggcggacttcacggtgaggcttgtgcttatccttgaagtgcgtgaagtgcatgtactagtgacagtgtcctagcgtcttcgcactcgttttgttaatctacatcaaattcgttatcatcgcacgaagcaacgagcagcagtcaacaattaattcgatatacccaaatgaaccttaaaaatgtaaaagcaaccattcctacggcgtcaagtcttactggatgcacaggaaaatcgccaccagcagggctgcaccgttcacgaaaatggcaaacgggaccacactcgcagctgagcttgaagccgacgtctccgatgatgccgacgccgaggcggacgcggaagaaattccgtcggcagtggatgcggccgtcgagcccgacgaagtccccactgcagtcgaagccgccgtagatccgtcaccaacgttcaccgacgaagcagcagaccctgcatttgcagcagacgacacagaattagaccctgccacctccggggcaattgtagcgggtgcagcagtttctggcacggtagtagtcggcgcagtagtagctggagcttcagtcgacgtaccggtggttgacgacggcgcagttgtgctgggggtcgtcgtgctgggagtcgtggtcgccaaaccggaatttccagtgttgctagccgtagtagtcgacggtgtcgaagtcgttgaggtcgagggggcagctgtcccgccaacacaagtcatcgccagtttgtcctcggtgcttgcattgttgcactcctgctctcccggacacacatccgacgagaaattctccacgcacagcatccagcaggtcgtgccgccattcggcgagtcttcacagtcgcagtatttctcgcacaacgcggcgtcggtggtggagtcgtggttgcacgtaacttggcacgagtacgtgaggtccgacgccgtggccgtgctcttaagagaacagatcttgagcgagcaactgttgtccgatgcagccaaacgccgttgcgggggacacgccacagcaccgaaagcctggtggtcttcaccatcttgttgcatcaggtaccgagtcgtctggtttgcgtattgcccaaaggttaggccagtgttatccatgacctggtgctcctcgagcaaaatcatcttgccgaaccacgaccgcaacagcttgttgccttctccgtcctcgttaaccacgctaacggtgcgtgggtagcgcatgccatgcaacaccgagtgaagaggtggcgaggttttgatccagtcgtcaatacccgacccgagcatcaaaatgagctcatccgggttaagtactgggcgcacgatctccccatttccaagctggatgaacagtcccgcgtcttgcccttgcgtttgcttgagttgcagctcgccagtcggcaacacctcaaagtacgcaggtgcaatcatggcaatcatgaggccgttgtccgtgtgcaactccagcgacaagtcggcaacattgagctccgcgtctgagatgtacccattttccaacttgcgggaggcttcgtaggcgtggaaatggtccaaatgcaccgagtcctccaaaagttgcctcgccgtcatggcaacagcacccttttccgccaccacgtggaacttttgggtcgcgtccagcgccgtgcccacattggccacggccagttcgactgcagcgctgaatgcggcgtgggcttcgacgtactcggggcaaactgccagcaattgggcactctggtccagggcttcacttaaccggcgacccgactcgagactcacggtgtagcggttggtgccgtctctcagctcgcggtggagcaggaactcggcgccctggcgctgggcttggacggcgcagtccgcagccgtgcggaggtactcgcttctcaggttagagaaattgggtacgttttgcaacgcaatgatcccattctcctggagcctcgccagcaaatcgaagttgtgcgcgttgttggcggcgctcgagagttgggtaaagtccacggggggcacgcggaagtcgcgcggctgtagagctgcagccagcggcgccagcaggaggaggctcaggcagcgcagcattgcggtgggtggaggtggtaactgggctctggtccggttagagaaaatgggacgtcgtcggagacgtgtggggtgggcagctagttgcagactgatcgacgtgtttgtggcggtttagagcctaaccgtatgttggtttttgtataggtggcagctcgcccggaaaccacatggctggctgagcaggctgattccgcgcaggttgaaggcggcgggtatcaagtgtcctcccgcttccaccggcaggaaagcgggtggccagcaccaatcatccggagtaatggaggactgagtggcattggcacttgcagtcgagaaaatgaggaagcgtacgaaaccattcggtgcagatgcaagtggcttcactcaccttcgacaaagttacggtaaaaaaaagagtgagggggggggggggcttcaactacagcaacctgcgcgaatatattagcctgctggtctttaccgcacgatgacaactcccatttggatcttgcgcatgcatatgaagtacccaccagaagatcagctgcgtacagtcaatgtgatatcatcgggaccttgtgttgattttttatccctgcgtaggatgtggcattttagatgcagagctccaggtatgtgcggttgtacgagttgacgccgtcgtcctccagcatcgggtacgcgggcgtcaggccgtcctgcgcgtacatgtagagcgagttgtagatcttccagtacacctcgcgcacgcggcgcgccgggtggaacagaccctgcagcacgtactgtagcaccacgtgcggacccaatgccacacgacagccttccacggcttcgaacacggcgttgatcacgtgcggagacgtttcgaaaatgttgggccacacgaaattcagcaggtgcagcagcgcgtcctcgcaacccaatccaaccacacccagcgctagatgcttcacggtagtacacgccgtttggcgatgcaccagatcacggtccatgagtgcgtcctgcagcagcggcgccaccgcgtagatgtagtccttgcccatttcgccgatgtactcgaacatgaacgaaaatgccttcaacacaccgttctgcacgttcaattcggggacacggtactcgttcatcagcgctgggacgaccgtgaacggagaacatgtttcggcgacgatagcgatggctacagtcgtacacacgcggttctgtcgctcctgcaccttcaggttgttcagcaaagtgtgcaacacgtcctgaggaccaatagccttggcaatgtaaccaaatgtgttgactgcagcacgtcggatacccttcttgtgagccttcagcatgtccagcagctcgaaacaaatccgcatccactcacgagccgataccaaatccgcaccacgatcagcaatgcgtccaacaaggtcgatacagttttcttggaccttctcgtggcggtttttgagaattggcgtgaggcgcggaagcagatccttgatcggtggggtcatcttgctcatgccgatcacatttacgatggctttcagtgcaccaagaatgctaccaagcacctctgggtactcttcaccgagatactcgtacagaacaacacccatgtgacccatcagaggctcctggtcgcacgtcttcataaccacagcaatccgattgatcaaatcagctgcctgcatgcggaccttggccggtttgttgtttagtcgccacttgatagtaccgcaaatttgcggcaggtagttcttggcacgaattcccaacgcgttcaccacaattccgaacccattcaacatcacgaaagtgtcgtccgaagtttgctcctggaaagcataaagaataccgtcaatgagtttctcctcaagatcggttccaatatctgtggcacccaagttcgagataatcttctgaattgcctccatgaccatacggcggtacggctcgctctcatccttcagatcatcgacaacacgcgagatgatctcgctcgccccaacgttgtttgcaagttccactgtcgtctccactagctggcggtagttgcgtcggtccaatgccatgcggcgaacccagaaatgccggaagaactcgggcaggatcttttccttcacataggatgcctcaacaccgtcggtagaaacacactgcttcaccaccttcaatacaattttcttcatttcttcatcaggcgactggaactcacgaatcaagatctccatcacctcaacagtgtaatagttcgcgtactgcgcatccataagaggaatgatgaaaccgatagccttcagaaatgctgccaggcccttgccgtggtgcttgcgggtaccgcgccaaagtggtcggagcacagagtcgaaggactcaataccatacgggtgcgcagcttcagcaagagcagcaagagcaagcgctgtgatagtgcgcaccttttgctcgtcttccaggccgtgctcaataatctccacgagatgcttcaagtgcggtagcacagcacaacccataaggatagcgacttgctgcacgatcttgatacctgtgtgtcgtgcttgccaggactttcgcgactggcaaacggccttcaagaaaggcagcaatgccgggatacccaacgccgaggcaacgaccgcaaacgcacgggcagttgtgttacgaacgtactcgtcatcaatatcgatatcggggcgcatcgtggaaatcatggtagcaagaccagcagccttggcgaggttcgaaataatctcgcggccctctacacgagcgtaataatcttcgtcaatcagcagtggttcgatcacaaccaggattttgtgtacatacggtcgaacaagatcatccagcttgtaaagcacacggtcgatcaccttcaccagcaagtgtctctcctggtcctcgagcgtgggcgccatgagcaatggcaagatctggttgaatagcgcgccggcaccaaattcgcgtgccttatccgtcagctgtctcagcgcactctttcgctgcggcggggtgccattcttgatcttcagcaacaagcgcataatcttacgctccttggcagcctccggatccaagtcttcctcgttcacctcgtccataagcttgccgaagtattggtagtcctccggcttgataaagggcatggaactaccatccccacccgacggggtgccaacaggcacaccgtaatcttcacgcgccggcgtggcctgcattgcgaaccccggtgtttggcccatcggcgtaggagtagcaagtagcttccgtgacggagtccgaataggcacatacgacgcaggcgggtccaggatcttgtatcctgtagcggggaacagcgcgtcgagctcctcatccgtcatggggcgattgcgctcttcaatctcccgctcccatcgcatccgctgcgccagctcaggcgtcagtgctccactcatgatatcgggcgtcatctgcacgctcttaccgggcgtcgccatgccagtcgggccggacacgggcgtctcatcccaccgcgagcgcttcccagtgcctgcaggcgtcgcgccgcccaaattcacgggggtggcgtcccatttggacgccccactgctagccacgggcgtttcgtcccacctgttcttccttcctggggtagcgcccaccgccgagcccgacacgggggtggcgtcccacctggacgacgtcctcgtgggcgtcgcggccacggagctcgccgcggagctgtcggaggccgtatcccactcggattggctctccccgtcgtcagtcttctcggccggaggcgcctcttggtcccagcgcatgcgcttgcgcttcctcttgggcgtggcgtcgggctcctcctgcttgtgctcctgctgcagcttctcctgctcctcgcgcttctgctggatcttgcgaaccacctcggcgcgctcctgctccagctgctgcgtctgcatgatctccttgtagctgcgcgcgggcgtctggccgctgaaggcgtcgccgcgctcgggcgacagcacgcgctcgaagcgccgcttgcggtacgagttctcgcggtccacgatgcgcgtgttcacgagcccggagccgttggcctcgcgcgcctcggcgaacgggtcgtagctgtcgtcgatgaggccatcggagcgagagtgatggtcactgggtttctgcttctgcggcttctggtcctgcggctcctcgtcgccctcctccgtgacggtggcgctgtagccggcgaagcggtcgccgcccccgacgccgtagatgtcccggtcgaactgccccgtggaggagaggcccacgcccaccttctcgtccttgtcggccatggagatcgctcgcccttggtcgcctcggtcttgcttggtgtcggctgcctgcggccgctgagacggaaataacctcggagagtaaaacctcgttgttgtgtggaccacgttcatgacgtctcgactaagtacgagttacgaggaggcatggcgaagttcgaccatgatggcactgtgctcacatgcaggagcggaggacggatactctatagtgtttacctagctctggatacatgttcatttgcccaggcgccacctggcaggcggctggcgtgtgattccgcatcgtaccacgtacaggtcgcctgcaacaagttgtagatgtagatgcaccagagctgaatgcggcgggcgaccgacgccattaatccgcggtgctggcggtacatgtacatgcatgagaggctgctgcgacggatgttaagcagctgacgatattacccgtcgcaaatgccggtgcaagggcatctcgacagcacaagacaatggttgacgaacgctgtctgcccaagtagagcaggctgcttggtcacctgctacatgcacaccattcaacgatgatggcacattccgcggcgttctcgactatccagagcgctgcgagtgtttccccgctcgcccagagaaacctgctggtgtttggtgtcgagctcgactcgagcctgattcggaaatgtgacaaagatcacacgccggcacttcaacggccgtcggcgccgtatttgggcctaaccgcttcctcatttgcgaaaaggatcaatccgtgccaaggcggaggagagaagaggagctcacaagagagcgatatggccgacacgatgccgctgccccgccaggccgccgtcccgcgcaagcagcggtacgcgctggagatcccggagcgcaaccagccgcaacagtcgccagcggccgccaagcccgagagctccggcctcgaggagacgctcacgtggctggagaagcagcgccagttcgtgcaggcccaggacggcaaccagcgccgcaagcgctcgtccacgttcgtgcgctcggtgctgcggctgctcagcgggcccaaggacctgagcagcagcagtagcagcaggaacaacaacgaggcaggcgatgaggagggcaacgcgcccaagctgccggtgccctggggccaggacgtgctcaaggcggactggtccgaggtgggcttccgcctactggaccagcccatcatgcaggacatgaaccgcgtgcgctcgttcatcgccaaggaggagctgctcagcgcctcgccgcagggcatcatcgcgctggccaagtggctgcagcgcttcgacaaccacgtgcgccacgtggtgacgctgaaagagtatttgctggaggagcgcacgctcatcgcaggggtcggccacaaggtcaccacgctgtacgacgcgtacgacgaggccatggcggtggctctggaaaaggtgcacgacgaacgtcgggacttgagcgaagccgtgctcaagatgttcgacgagctggagaagattttgaggggagaagtcaccgccgtgaagtacctgatcacgcagacgttgacggagaaggaggagtacgaggccctgagcacgctcttcaatcagttgactagcgacgaagagtgcggcgtgatcgtggcccacttgcttggctggatgcgcaacaacatgagcgagaaagacgtgtgcgtgttcctcgcgctgttcaacacggaggtgcaggacaagatcgccggcgagtggatgcgcatgtacgcgtcgtacctccacttgctggacgagttttccatcaactacgacagctcgctctcgtatttcacatgagcatcggcaggcggcctgcgggcggctgcgatgcgccatgacgatgaaaggtagacgccgctgcggacttgcccacgagcctaaaggcacaggggtcgtctactgcaattgctatcgtgcatgccgatgcgtgcgactggcgagaggtacattagaagagtgagatcacgtcgtctggcggtcgtcgcaggccgcgagcttttgcagcctatgatattcttgcgtagttcacaatgcccaaacaaattataaactcgaagtgcccgacaaattccacacacgcagccagggctcaagaaaaccactttgagtaatgacaaacaaattgtattatcgcgcccagacctgttgcatcgccgtgactttttggtgtgctcaaccgtgggctgcgctatctctaacctagtcgaagcacgaggacttgcggatggggtcgatccagtagcgcgcgtatgccacgctggagtagaccatggggacgctcttgccacggccgcacacttcgccgtcgcgccagttgcgccagctaaccacaccaaccaccacgtcgtcggcatcgtcgtccaagtactcgatgaaggccgggcccccggagtcaccgtcgcagtagcccttgctgatctggccaccgacgcagatcatggagtcgtccacggagatctgtccgttcgtcgcgcactcctcgttggtgatgagggtcgagtccacgcgctgcagcttgtggccggccagggccgtggagccctccgacaggcgaccagttcccacggtagtcaccgtcgcgccggccttgaagtctgagccgtccgccttggccagcttcgctggcgtgatcgtggacggcacctcgagctcgaggatggcgaagtcgttggagaacttgagcgactcggtgaagttggggtggttcatgaccgccacgaccttgatctgctcgccgtcgtcagtgccgttgttgtagtgcgagccgatcgagacccagcgaatgtcgtacgagatgcagtgcgaggccgtgagcacgtgggtggggctgatgagcgtgccgccgcagaagttcttgccctcggccgtgtggcgcatgccggcgtagtaggtcttcctgcccttgggcacggtggttccgccaaggatgagcttgcgctcgaccacctcactggaggcgttcgcggtggcggccagcgtggcgaacgcagcaacgatagcggcggtgaacttcatctcgacggctggttcggtagcgcggtgggctgcggtcaaagaaatccaaagtgatgttcagtcgctgcaatgcaagccatctgatgccgcgcctgggacgctttgctgctccagggacaagcccgctgtgcggttcattgagatgtgctcaagttaatctgctaatttttagattaaaatcggaatgttgcaagttcattgaaactgcatctcggtatgtaaggaggtttttcaatgcaggcactggtttcggccccgcggccaactcgatgcagctcaagcatgcgtcccaattgtcaaacctgcacggtaacgtgaaaatgtgcgaacttaagcactacgatttggaagcacttttttcggcgaaggtaataatttcaacaggaacaatatgtttgaggaacaggcatttcgcgtgacgtgcaccaaagcagctctgtcccgagcttcggagtgaatgccttctgaggaagcacaactgccaggtgacctgggtacaggtacatttgtgtgctgcatcgccgttacaacatcagccgccattacgcgggtctctccttcttcacctgcggtttgttagtcgcagattcgagacaattaacgacaagttctatcagaccaccaactgacagatatgtcggggaggtctcgagtcgagacctcgaccgaggccgtctcggtaggcgcaggagccggagtgtcagctgggtgacaagaaaatacaaatgcaacccaagtcaatcagtttgctgcttggttcacccactttgactcaaagtttgagtcggagccttcggggtctcttcaacaccgcggaaactttgctcggatttggcagatcccattttggtgtccgcacagctatgaacgggatattcggagcagccgaacttagcgccaaatgtgaagtttcatcaaatgttcggcgttctcgtcgaagttgtttcggtctgcagttctgcaggcagtcgagcccggcaggtacgagctgcactagtctctcagcaacagcatggaccacttaatccggtctgtctctctttctagactaactcgtgattaatatgcccgtattgtagtgcaagatttggaatattgtggaccgtgctgagctcaaaagcacattgcattcggccagcacgaatgcgtcccatctcgttgtactgcatacgaatactaagtattgctaacgtctctgcctgcaccttgacaggtgagtcgatcggagaaccaatacgctgttgctacaagatatacggccaccgcactctcaaatatagcaatgggcattgatgcgaacttagcaaggtgatggagcgctgagacttgtgagcagggatctccgtctgcacagctcgcccgtgatgcagatgctgcaatgcaccgtcctcagccatttgggcttttgcagggttcccgtcgctgccgccgcgctgctccatcaaaatgaagttcacgtctgcgattggtgccgccttcgccgcgctggcctcgtgctccgtcaccgctcagtcgactttatccagtctcaccagtgacctcgccgacgtcccggtcacggagatccaggctggcaagtcgtatgtcgccggcgttcgctccatcaaggacggctccaacttctgcgccggcgcgctcatcagcgcctcgcacgtgctgaccacggcggactgcatccccaacgacatccgctgggtctcgctggcctccgactcgtacacgggtgcggccgacggcgagcagatcaaggtcgtggcctacatgccgcacccgaacaacacaggctacgccaacaacttcgtggtgctggagctggagaaggcgacgacgttgaagcccgtgttgctggacccggccaagtcgatcgtccgggccggcatcaagggcggccgtctcggctggaacgatacgttggcggaggccgtgcagtcccgctacctgcacagcgtcgaggtgcagctggtgagccggaagcagtgtgcgaccgagctgacggtggacgagtccatgctgtgctctcgcggcgtgtcgatgaccaagtcgtgcatgggtgaccagggcggcgccgtcgtggtgaagaagaagaaccgcgacgtgctggtggggctcgtgagcggcaccgacggctgcggcgaggaaggcggcatgagcgtcttcgcctccgtgtccagcgtccgcccctggatcgactccatcatcaagggcgtctgcgtcgcctaagctccataacctctagtgatagcggatggctttgagtactctttcgagccacctataatgaatcaatttgcctttccaacgtcgttcatttctccttcaactcgtcaacttcaaactgcacagcgatttatttttcttttgctctacctcgccttacttcttcttgtccatgcccattttcttggtgtagggcacggcatggcggagatcaatgcagtccagacgcaccgtgcccagaacacgctcgggcagctccatggcactttgagcctcgatcacgaacgccaggtcgatgatgaggtcgcgggcgtagccgagcagcaggttcaggatgcccgtggccacggtactgctgccgatgtcgtagtccacctccaggtagttcttgccctggtagtatttctggtagatcttggtgccgaggatggccggtgtggtgccaacaccttcgcgaataggccacgtgccttgcaccacacgcgggatgagcttgatgcgctgcgtacggaactcgtcgttggggcctcgtagcacttcgtggcatagatcagcaaagaccgagttcttttggagctccgacgggtcttcgggggtgaaataaagcacgagcgagtggtgcggtgggcctggcaacatgaagttgatgatgaagatgaatggccggtcctccacggctgggcttggcacgtccgtggcatcgaagccatcacccacgaaagaagatacgccgatgtgcgcgataggctcgctcgacttgtacagctccacgttcacgagacgacaagcctgacgagccgacggcacctttgtcttggaagttaaatattgaggaccccggaccataaaccctccagcgctcggctcactccagaacttggtcggcagcccgtgcagcaccgtgaggtcggtgcggtacctctcgagcatcggaaacttcttctcggtgacaatttgctggcttggaacgggcgattttccaccgagacttactcgtcgttggttggaggtcgcggtcaccgggcgcaaagtttgcagtccatcagcggctgtaattgccgtgatcatctcgagaaagaatacaccgtacgcgtggacgtagtaccacgaacgcgccagtctcgaatcgatccagccgttggggttcatctggattgtcaacgtcacccagcactcttcgaagtgattgtcgtggtcttcttgaacacgaggggatatgataaacccgccgcccatgatgttcgcacgcacagccccagagttgcgcgggcaatctgagtgtgttgtggactggaagcaaataaaatacgagccatcgggctccatacgccaatagcgtagcatgcacagctctcgagcgcccacagatactggccacaaaaatgttgggaacagcttccagtaaaccacgtcgctgtgatcctccgtgtgctcttccagtacgcgcgcctcgtcgatcacgtggttggaaacgtagaacgggctgttcaccttcatgagcatctcgaatactttccgcggcgatgcgttcaccttgaggctcgttctcagggcaggaggcggtgcagacgtccgtaggctgctctggtgactcacgcgctcagtatcaacgcgtagtttgtttgagaactcgtagagtttccaggacgtctcctgtgagaatgtcgccgacgtgcggaagcttttcgcaatggagcgtggcatcgatccgaatgaaccagagcgttgccgattgcctggatgaagagctccactcgagtttgacttccccaaggaatgctgtgagtgcgtccgtcctctcggaacagtgcttgccgacgctgtcgtcgcgtgcatcttgctttcaggcaacggtgtaagcgcttcttccatctcggggtcgtggtccatataccagttgaggtatcgcttccactgctcctccgcttgcgcgatgcactcaagaatgctattgcgccaccagacagcagtctccaacgactcagcagcaagtgcaataggtcccttgctgcggctctgggcgatcatagctcctgctgccccagcgcttgcagcagctgcagcactcatgctcatacccatgacaccgatgccaacaccagccagaccaccagtcaacaccacggcggtagcggctgtggcggcagcagcggccgccgccgcgcggttccgaaacttccgcgacgtcgcgcgcttgacgctcggtcttccatcaaactccgtgtcgtgtgagagcgccgtcgcgtccaacggggaggacgactggaactcgcttccaagccgcgaaggcgtcgtcccgggcgtcatctccactccagctccactctcctccacgtcgtcattcgtcgcgtggttcaggtggcggatgcggaacgtgaagagtttcttggtctcaatcttactgggcgactccctcacttcgtccaccgtcgtgccgggacccagcacgtaccagccacgcggctccttgtcccctttcttcctaaagtagcacaagaagtgcgtgccattgggcgtcgagcggatcatgaagtaccgctctcgccacagattcacgtgctggcccttcttgcgcagccatccctccatcctgatatccccggcagtggggggcagcacctcctcatgatgtgcttcccctgctgctgtatctgcagtggagactggagctgcagccgctcgagccgaagaagaaccagaagaagaagagcccgcgcccgcaataaagaccaactggcggtcgcgctcgcgacacatttcctcgactatctgcagcagtcggggcttcatgacctcccgcacgacgctgtcgtcgaggcctctcgtcgaggacgacgcggacggcgtgttggcgtccggcgcggcctctgcagcgcgcttccgcgtgcgaaactccgccatcagctcgtcgtagaaccggcgcgcgcgctcctggaagagcgggtcctgcgcgggccgcagcgcgcgcgtgtccgcgccagtgaggggggcgcccgcgtgcacgctgatgtagagcttctccagcgccttgaacaccacgcgcttgccgttctcgcggctggcgtagcacgccgtgatgtagtcggcgcacacgatgtccagcagcatgttgaggcggtccccgtccagcaggatgtccgggatcatgcccgcgggccgcgaggcgccgtcgtcctcaacctccatcttcatgtaggggcgacgatacggataaatatcgtgacggtgccgacacatatgattttatacttagccactgtatggtggccgtggtccaatcaaatgacgatgaccgattattatcgaatgagaagggcgatagatggtattttatccaatcatcaacgttaggggtaggtgtatgaaccgccgacactcctgccgacgtataatgtaggcagggctgtcgagatatgttatccacctatagtgaagttaagtaattaggtgattatacacatattttgcacggtgccgacactttactatgacattgtattgcttctgtttgcctgtttgaagcgttctgtatggcgctttcgcttgctctacaaattcaaccgagtttcgtcggtaacgcccgaaccatctctgattcatggcacaagctgttttgggcattgccgaagccgctgttgtcgctgccactgagccttagtgactgaggtgcggactgtgcagcgtagagagttcaaagtagacatcaaactttaatttattcaatgttaaaataaataactacagacgtaatattcgtgcattacactgcaccaccaagcaccaccgcgctagtagaaagcgtcgccccaccctgcagcggcggaggcaccaccagtagcagccgtataaccacgtcctactcctccccaagatcgccagcagcgagcgtgcctctcgtcacacccagctatcgacaactcaaagccgccggcgcaacgcgcacatccgctgcgctgctgctgctgttggctgccgtggtggcgggcggctactgctacgtctgctgcaggaggaggtggatcccttggctctccacaccgcgtgctgtctgctgctctagcctccgcatcttctccatcttaggcaccttcttcttgttcttcttgtcctgcgtgatgtccagcgtgggtggtaagacatcgtctgcgccgccgccaggcgccctccatcaatcaatctcctcctcctagctcttgctctcggcgaacttgttgcctccgcagtccttcgcgcacttggtggccttggtctccttgctgtcctccgcgaacttaaagcccttggtcccctcgccgtcctgcgcgcacttgatccctccgccgtcctttcgcgcgcttggtcttctcgccgcccattcgcgctcttgaggcttctgtcaccctctgtggccttcgtcagcacgccgtccttcgtgtcctcgccccctcgctttcctccacgctattggtgttctcgccctgtgccttcagtccatcgcgcttcctgccgtgggtttcctggtcgtcctctctctcgtctggctggaggggcgcaccgctgtgccctcacactgggcgaggagagagggccagtttgctggcgatgacgagccatcacgcctgcgcatgcccgcacgccacgcacgcgtagcctggggaggggggggggcgtagcgcaggtcacggcgcaggtactgcactcagggtcgccgcagggtcgccgcccgcccgcactgaaatgggagaagtgtcaatgtggccctttagaccaatcatggaatttcattattttcaccattgatagatcgtgtcggcaggtgtaggcagatgtcggcaccgtcatggtatggtactgcagcaattgtgaagtgactaaaatcgcgagctaatgggactattccggactataaattgtgccattaagtgttgcatgctgaggacaagtcacatttgtgatgtcggatgttgacggtagtttttgggtatgacctgatcccagtgtatcctcgcgatttggcaacacgacgtcatcaaggtcacaccgctgataggcatggctttggcggtcgacgccgctcctcccgcgcgctgggcgttcctgtacccgtggtgtcgagtcctgcgaggcaagttgcacctggaaggccggacggctgaaaactcggcgcggtgggagtatcactgggtggcggtgaggctgccgcatgccccggaccaagcggattcgcgagcgctccgacggattcgggaggcgctggatttgctcgcgcgcgtggcgttgatcgataacgcggcgtggagagctctcttggtgcagcagtgtcgtgttccaagggatgaagacgaccaaccgctggactgtgagctgcacccgcggttccgcttcgtgttcaatgaaaagttcgtggagccaggagctttgtcgcctgcagcggtttgcaagggatttttcgtggctgcaagcacacaacgtgagagtggcgactacttggaagcgaggcgagctttggcggaggtggagggagcgcagactcggaaggggtttgacgtagagactgcgatcccgtttgagctgcagttcgagctcgtgacgctgcccgatgacacgctggaggcgcatctacgcgacttaaatacagtgctgggggttatgcaagctcagcaaaggcgtggggttgctgcgggggacttgctgcctttgaagctggagtcgattcgtctcgatgttggaggagtcaacatgtcgtggtcgctgacccagagactgacgagtttgctgagctcaggaccgccattttcgttgtttgcgttctccctgaagaagcccaccgagcagaactacgaggaaatgcaagaatgtgttggccgcttcttgcggacggtggtgtgtgggcaaggtcgaagtggcgattattccactgtagaagcgaaggaggggggcgttgagacgctctccgttggctgccatgactgtgacgagtggcagttcgctgctttgtgctctgcgatcggctctgcgtccgtgaccaagcaccttcgcttgtatggcgtgttcggcatgtccgacagcgctgaggtgagaaggtggaaatggcagtggctggcatacgcgctgttcaggacgtcgacagattcatcggtggggagagctcttatcacagcggcccagctaactcgcgaggatgtgttggctatcgctgtaacaatccactcgaactctccgcctaccacagtatcggcagaggtcgtgcgcgaggagaacctgctacatctcggtgactggaggcacgatacctacgggcagttctcagaaggcacggagctcacacttctcgacccagttcaaacaaccgagcgcagatcatcacccattctgctagaagcagactcgtggctccacattgtgaacgacgacggtgaccacttcgacgtgagcttaccaggcttcggagtcgccagtattgacaagatttctgcaattcaagtcgagcggcgccagcacctttcaacgggcatttcaccttctggattgaaggtgttgacgctcgctcttgctgtcgtctctggtcacgatggcggcgatgtgctcgccgacttcctgcagctcattgggacgctgttgctatcgctcgctctgtacgcaatcggttcgtatccgatcagcatggcgtctatcggccaggcgtgtccacagctaacggatctcttcctcgaaggcgtcgagctgttgaaccccagcgacttctgtctcgacgtcgagcgctccaagtgccacctcaagtgtctggggcttgtgaacgtcttccgcagcaacgaccagatcacgcgactggcgcaaaccctcgcgtctccaagcagccgcatcgctcgatacctaacagaactcggagtatctggatcggacacgtcgtgctgcatcgaccaagccaacgtccaggccttcctgtccatgctgcgagccaaccgcaagctcgcgtacctcagtctcgggatgagccccgagttgcaaactttacacgacgagtccttccgacgacaccacggcgagccgctgccggttgtgaaggacaagttgcccattctcaacaaactggccttcctcagtgccgtgcgagggcaacagcaacagcaacaagggcaacaaactgcaactgggctattagacgacggtgtactgacccatattttgggcttcgctgccacatgcgccacccgggccgtgacgatccactacgacgactgacccataacttaaataagattgctacagtactgttgcctggtactgtaggcacacgtgttgccgttgtaccggtaatgcaagatgccacgtggagcagtcgccacaatgtggcaatgcgcgcgcacaattgcacaaattcggccacttcaactcggtttttgtgccgttgcaaatcaaacccacgcatccgcatcatgacgcagcagagggcgggcgcgacgaccagagtcgccggtcgccactatcagacgagcagctcagctacgagaggccggcggatcatggcgacccccgagcccaagccggatgcgacgcagcaggcggcaactgaggagcagcagcaacccgtagcggtgcaagcggaagaggcgaagacgacggcaaaggaggaggtcgaggtcgaggcggcgcaggagatggcggcggccgttgaggtggacgagtcggtggctgcaacgcgcggcagctccgtggacggggagagcgtcaggacggaggactttgccggcgaggaggcggaggaggaggaggagagcagcaaggcggcagaggtggatctggctgagctggcggccttggacaagcagcagcaggaggagcaggagcaagagagcaaggctgtaacggcgacggagacggtggaggaggaggaggctgctgccatttctgaagagacgacggccagggcggaggtttctgaggtggagacgagctcggcagtggacgacgcctcggagatggacttctccgttgcggctacgatcggcagctccgtggacgccgacagcgtgttaagccttgaagacatgcgcgagtcggactcggaggctgccgagacgaacggtgcgaacgacagcaccgctacgtccgacaagaaggagacgacggaggtctctgagaccaccgtcagcactgaagaggtggtggctgctgcagctgaagctgttgctgtgagcaatgaggtgacggtgaaggaagacgtgcaggctgaggagatgtcgaaggagtcgacgatcacggaggtcaaggctgcgacggcggaggtggaggcggacgcggagtcggaggagcccgactcggagaagacgccgccgaagaagttctcgtccatgatctcgcgcttcgctgaccgagtcgtgtccaacaagacgggcgcgcaccgcaccgactcggcggcgcagctggagctcaaccctccttcgccggtcaagaacatggtgaagcagctggaagtgcacgaagaggcccccccgaagacccaccgcaccccgtcggctgctcagctggacctcagcggtgtgtcgcccgtgaagaatgtggtgaaccgcctggaagcgcaccaggaagaggagaacccgttggagaatctcaaggtccggactaagcgcgacttcttctccgagaaacagcgcagcatctccgtgagccaggagagggagaagtacaacgcgcagatcgcgcagcgcgccaaggaggagactgaagccaagtctcccgctaagcctgtgaccaagaagagctcagccatgtcaagcgtccgcaacatggccagccgcttcgagaagaaggcggagcagtctctggacaacctgtcgttccgtacggtgcgcagcttctttccgacggagaagagcgttcgcgttggcgctgagaaggagaagtacgagcaactggagaaggagaagcaagccaaggaagctgaagagaagctggccaaggaatctgcggcggatgcgtttactaccccgaccaagacggttcacgcccgacgatacacgaccactgaagctgaaagcccgaatgtacgcggaatcgcgcaccggtttgaaacgcgcgcgaactctgttgttgcggcccccgtccgcactatcgactctttcatcgttgcggacagcgaagcgagcgtccgtgtggccgcagagaaggcgaagttcgagaaccacgctaacacgtccacccctaccaagcggacgatcgataccttcatcatcgccgacagtgaggcgagcgtccgcgtggctgcggagaaggcgaagttcgagaaccaggtcaagacgtccgcccctgccaagcgcaccattgatacattcatcgtcgctgacagcgaggcgagcgtccgcgtggctgccgagaaggcgaagttcgaaaagcctgtgacgtcggcccccgctaaacgaaccatcgataccttcatcgtcgctgacagtgaggcgagcgtgcgcgtctccgcggagaaggcgaagtttgaggccttggagaaacaagttttgacggcggccccaagcgtgcgaacgattgacactttcattgttcctgagagcgaagcgagcgtgcgcgtgtctgctgaaaaggccaagtttgagacgccagagaagcaagccaaggcgactgtgcggacgattgacactttcatcgtgccagagagcgaagctagtgttcgcgtgtctgcggagaaggctaagtttgagacgccggagaagcaagtgaaggcggccgtgcggaccattgacaccttcatcgtgccggagagcgaggcaagcgtgcgcgtgtctgctgagaaggcaaagttcgagtcgaaggagaagcaaagtgctggccccgctgtgagaaccattgacaccttcatcgttgctgacagcgaagccagtgttcgtgtgtccgccgagaaggcgaagtttgagtcgctggagaagctggttaaggcgaccgtccgaaccattgacaccttcatcgtgccggagaacgaagcaagcgtgcgtgtgtcagccgagaaggaaaagtttgagacgccggagaagctggttaaggcggcagtgcgaaccattgacactttcattgtgccggagaatgaagccagcgtccgtgtatcagctgagaaggaaaagtttgagtcgctggacaagcagaacgtgggccccgctgtgcgggccatcgacaccttcatcgtaccggagagcgaggttagcatccgcgtcgcggctgagaaggcgaaactggaggctctagaaaagcagaagctgaaggagctggaggcgcaggcggcgatcgaaaagcagaaacttgagcgggcgcagctgctggctgccgctgagaaggcgaagttggagaaggctagcgaggccgaggtgaccaagcagactaacgttgtgacggagaccgagtcgattgagcagaccgaggccgtgacagaggtggctgagcaggctcaagtggtgacggagacggagattgtcgagcaggccaaagtcgtgacggagaccgagcaggccgaagtggcggaggtgaccgataacgatgttgccgagcaagcccaagtagtgacggattccgaagtagccgggaatgctgaagatagcgaggtgatcgaccagtccaaagtcgcgacggaaaccaaagtggtcgagcaggccaaagtggtgactgagaccgtggtggccgagcaggccgaagtggcgacgaagtttgaggttgctgagcaagacaaagtggtgacggaggccaacgtggtcgagcagattgaggctgcgacatcaactgaagttgtcgagaatgcccaagccgagcaggccgagtccgtgacggagaccgagagcaacgtcaccgtcgaggcagcacctgtgacggagaccaaagtagaggaatccgagcagaccaaagttgtcgaggaagtccaatcggtgactaagtccgaagttatcgagcaggccaatgtggtaactgagaccgaagaggccgagcaggccaaagtggcgacgacgaccgaggctgctgagcagagcgaacaagtgacggagaccgacgtcgtcgagccaaccgaggccgtggcagaaatcaaagttgtcgagagtgctgaagccgagcaggccaaagtggtgactgaggctgaagtggcggagcaggacgaagccgtgacggagaccgtccctatcaaggagtccgacaaaggcgaggtcgaagtagttcagcagactgaagacgccaagcaggccgaggaagaggatgtggccatcgagtccgagcaggccaaagtagaggtgaccgaagtagtgcagcagaccgagcaggtgacgagcacggaggaggtgaagcagtccgaggtagtgaccacgaccgaggtggtccacgagaccaagcaagttagggtgacagaggaggaggaattagaagtagtgcaggacgccgaggtgtccgaagtagtgcaggagaccaccgagcaggtgacgacgaccgaggtgaagcagaccgaggcggcgacgacgacgacaaccacgacgaccgaagtagtccagacggtcgaagaaaccaaggtcgagaacgacaccgccatcgagcgaatgcagtacgccccggacctgaccatcccggtggtggaagtcacggtggagcaccagacgttcgcggacgtggtgtcgacggcgcagcacgtgcactggctgtcgatgcccccgagtgccagccccgccctcgcgcgcctccacacggtgctgaacgaccaggacccattgacggcgtacgctctgtacccgccgccgtcccccacgtctcaggacggcgaggaggagctgccgctgccccacatcccgacgtcggaccccccggcgccagtgaatgccgagacgccgccgtaagcgtctcgagacccaccccaagcaccaaaacgcccgttagtagcgccgtgatccacttgatttcaacgagtctttgtctgcatgctcatcccactgctgtcccccgtgaaaatcttttgaagctcattgtgagaccttccaagatttcgtcacctccaagcgatgcaggcgtcgtctttggtggacaagtacgcgttcctggagccctggtgctcggtgctgcggggccggctggccacggaaggacgcttctcggaccactcggcgctgggcgagtactggtgggtctcggtgcgtcctccgccgtcgctcatggccattctcaatcgagaggcgaccgacgtccgactgctgcgggaggcgctggagctgctgagtctcgtggctgtagtcgacaatgaagcctggaagctgctgctgttggagcgctgcggcctcaagctggacaacgacgacgaatcgctggacggggagttcatgccgaggttcctgctgcggttcgacgccgagcacctgcgctacagcgcgtcgctgccggcctccaccatccgccagttcttcctgccacgaccgccgctgcacgtcaacaaggcggcggcgcgcggcgcgcgctcgagcgcgggataccaagatgcgcttttcaccattctggccttccaccgagcagctgggggccgacaggaggcgctcaacaggtggagagccatcccctacgctctgcagttcacggacttgtggaacgtggggcaacaggtgcagtcggcgcatttgagcgcgctgctggtcacgctggacgaggttcgacggcataatgcgtggttgagtggagctcacgaggagaagcatcgaccgctgctgctggatgaggaggggaacgagacgcacggctcgccgatctgcagtgaagacgacggaacggcggacggtcactacttcgcgtacgaactggagtcggtgcagatgtgcttcggcacgatccccgtgtcgagggacctggataatgtcatgctgacggcgctgggcatgcccgacgtggtgttctcggagctgcagctttcgctccagcaggacgttcagacgagcttcgtccgccctgatgaggtccatcctcgcactctggcagcgtactatcgttgcgggatgctgttcaacaccatcttcggaggtggatcgattgttacaaggccgaatgaccagccgcaagttgttcgtcgtagcaccatcgagtctgttgttattcccatgttcggcatggacgacttggccttctcggggttgtgtgcgtcacttgctgacgcatctgtggtgcgtaagttgacgctgggcggcgcgttccgaccgcttataccgactcaacgcacctggaggtggaagtggctagcgtacgcgctcttcagcgaagcttcaggctcgtctattgaggagatcaacctgatgggcgtccaactgagccacgcagacgtccacgcgatcgctgaagttctcaccgcgaaggtgcctgagcccggtcaagccagtaacgccgccgagtctgcgtatgccgagggaggacaagctgtcgagtacgtctgggtccccaaaggcacgtcggtgcgcatcaaggagtcgattgccagccccaacgactgcaccacactggaaaccgcagatgatttcacgttccgcctattgcagagcgatgacgagagtgagtgggtgaatattctggtgcctggacgcggtaacggcgtcattgcatcggaagatgttcgaagactctcggacgatgagctacgtcagccttgccaacctcgtaatgggatcacttcgctctcgctctctatcgacagcaatgcagagcaagacacgaccgtcctgcttcgcttcttacagctcgttggacggccactcaagaagctgtcaatccagacggtcgggtcgacagcgttggatgtccacgaagtcctcaaggcgtgcccaaaactagaccagttcttgctcgacagcgtacaaattgacttggatgcattgatggtcgaggtggagaagggcaacgcgaacatccgctgctttggtctcgtgtactacaacactcccgctgatgttatcactcgcttcgcccagacgctcggagacccggacagtgcgctcgctgatgggatgcgcgagttgtgcttgagcgctgataaccaggagttccccatgaccgacggcaacgtgaaggcgttcctggacgtgctcaagaccaaccacaaactcatttacctcgatctattggtgctgccggcgctgtttgacaagtactcggctgcgtttcgagctcaccaccaggaaacgctctgcgtggagaaggagaggctgccgctgcgttcccgcctggcgtttctgagtgtggttcgtggtcacagcgcaccagtgaatgacgcattcctgcatctggatgacaacttgatcaagaacatatttgcgtttgctgcggtctctgcaaagcgcacagtttgccttcgctgcgaccactagcgcctgtgatacagtacccacctcgcctgcacggtcgcaaatactatgcgtgactccgttttctgccgaatgctgttgaactatgcagaaacttctttattattattagttggtgcgccgcctatccggaagagctccaacaggtggtagaactgcccgtggatgtcgccgcacgggctgcacgttggactcgcccgacaggatctccttggccttctggcacagctcgtagatctccgtctccgtcaggttctcggcgcggcgcaggcgctcgatctgcgcgtccagcgccttcatctccccgcgcgagtccatggcttggccataataaataatgtctgggataatacgttttgacttggagctctcctcgagttataataaatcaagagcgatttaataaaacgaggtcaaagaaagggacagatcgatctatttaggccggctaataactcgccaatccaaatcagggctcgaggggtggatttgagtagaacgaggtcgatctacggtaaatcgatcctttttgcgttttcaaaagcgcaattcgaggtcgatctaagtaaatcgagatcgtccatgctaccccctctgatttgtgccctgatttatggaccggcctacctcgatctaggccataaaacggggcgacattttatctgcaaagcacaatatttttctattgctataatagtagagttctacaatgtgcacgacgccacctccaaggttcgtattttatttctgtaccgtaccggatcgcacatgatctacttcaagcaggcgagaagtataataacaatttacgggacgagtatgaaatgcaaagcaaggagcaccacatccaatcgtgtccagcaagcgagctagacgtctgctctgcgtcgtcattcggaaaagacggtggcgcttagcgagggcagagcgcatcagaatccattgatcaatccccaagtgaactgaatgcgaactaccttaactcccagctcattggatcccaatggtttgtcccaagtgttggttccgtgttgtggacacttcaacttgcgaaccaatagatgttaatactgtagtatttctaacagcagtacctcaaatttacaggttatcacggatagcgccttgcaagcacaatctagttgccgtagtgcttaagcgggtgccaaagagttcatctcgtattactcaatgtactaacgtctacctacagggacaaggtgcagtgtggtttgcacatatatcattttgttttcggtttaatattgcgttagcgaattgctcattctcattcgcagataatatctgcatatattatatgatcagccgtggacttacatggaaacatggtgccgagccaacaacatgcaccttgtacgtacatgtatggtcgtagaaaaaaatgaaatactaatcaatacattccgagatctcatcccggatgtcatgtaatgtgattagtattatcgcatctacagtatggtcgtggaaaaaaatgaaatactaatcaatacattccgagatctcatcccggatgtcatgtgatgtgattagtattatcgcatctacagtatggtcgtggaaaaaaatgaaatactaatcaatacattccgagatctcatcccggatgtcatgtgatgtgattagtattatcgcatctacaatacagaatacttatatgttgagaagacgccggaatggcttgggatggggtgcaaccacacttaacactacatgtacagaggaatttccataaatcattgattttcactgagatttgacaaaatgattgtgatagcttaaaactactgactcagtgatttggtaaatagtaatactacagtagtaggttttcgcttctttcgattactctcgttgggtaaggcccagtcgatgtgaaggaagcagacaccacgacgaaggccgtagcctacttaactatgcgtcgacatgtttccccccttcacaaccgagcagagtcgccgcggcaagagacttgaaagaactgagtaccgatgggatccgacatattaaactaagaacatgaaccgaaaaccttgtgacgcacacaatgtttgcaggtgggtgcggaagtactttgtctttctacgttgtgggaatccgccactttataagttgccaatacactatagtagttactatatcgcagcacaatataatatcatcctcaacgagacttttacacgacctgcgtttatttttttggtaagatgtctctatttacatactacatttattctgggggaggagtaaagttgccagtgcaacctacatccgattatttgtagccgatcaaatgatgacgagagctatgcataggctgggatagaacttagtgtgagcatcttcaccgcggcggcgcagtcactatcgctatcgcaattcaacgagatacaaagtcgcgcgcgttgcacgaagaagctctgcaatctacggattacctgttacctgcagtatctgtggtatgtaaatttgcgtttccattacaacgcatctcctgctacattgactaagagcctaccaggatgttcatgagcctttcgcccgtcgaccattatcatcttctgcggacccaaacttaactcgcacaacacaatctcgctcacctcgaacgcggttcattcctgagattgcaggatccgtggacccgtggacggaggacctgtagcggaggttgaagcggttggcatcccgcaaggctgtcctcattgctactttatcacttttatagggctgggtacttggcttcacaaaaccttggtctattaaagataacatatctcatctgaagctactatcgatgcatgaaaaccaaaaactaggaaggaagggggtatgcgcttcaagcatagttcagatatcacgtaagtgccactggttggggtcgcctgtctactgtaccgtagcaaccggagtatgtactaataacatcgacagtgatactatattatgtagtattagttatagtaggtaacatactatctacatgtactatttctagtattactataggtctacatttgacttgcaaattgtatggacgcgctagtacgatactactgatgttgcatcagtgaattcaggcaaactatcacaatcattttgtcaaatctcagtgaaaatcactgatttatggaaattcctcacatgtacatgttggagctcgtaattgttgagagagcctcagtcgtgaccaggaaggacgcggcgagcaccatcaaaacttgagaaagacgcatcttgttggtcactgggagtcggggttaggagctcgaaagtaaattccgaagtgggagcctgcctaatacacgtgtagatcggacgcactccacgctaccaggccaagatctcgaaagaggtttcacccagccaccgacttctgaggacccaccaccgtgttgtcgaagatgaggaagactcttccgaggagaggaccctctctcagtctcaagtaaagtcgattctcgacgagatgggcctctcttggaccaaatacctgaaaaacccgaactatctcctacgtcacaagaggtacgaggagtacagacagctcgctaacaagattattgacggccaaaagccccacggacctccgaagatcacgtatgagcaccaccattatggataaatttctccccaggccgagtggccgcttcgcgagtgccaagtcagaaacaagcatcatgttgaactgttccgatcgtcgacagtgctctagatattttacatgtgcatctgagcggtaatacggttctatcctcacgttaccttaagtgtttttacatgcagagatgagctttttggaggatggagaaccggaaccctttgaaacagcgatatcaacagtttgcagtacattcagctccaactatcgacagctcctacgactttcaaactccgaagcaaatcaagttatcacttttgaagcgtcttcggcactccaaacatttaggcgacttcatcagcagagataaaatcagactcaagctccagcatgtacgtacaattgccgaagcttgaatctgttttctcggcatttaacatatcgctcgagtagcgtcctacatgtagtgcacataaattgagaaaccagataaatgtgtaatcgaacacattttcttcctgttttacaggaagaaaaacttagctttatgctcggacgagtttcgagctatcttcatgcacatacagttaggagtaagtagctactggcaaaccgatggataaggatttttttctatgcggagttaatactaatgggcttggaagcccgcacacaaacatcaaatcgctgccgcaaccattacggctaaaagtatgctagatattctttgaaatacatgtagtttaacgatgtgcgagcactgggcacctgatgtacattatgcactccacagcccagagcccaagaagagcgcaagcgttgagcttcttcgacaaatggcaacaaaagcatacgcatgccttagctttatgctaaccagcaacgaaccaccgctaattaatttcttcactaccaaacctggacaccttcatcaatgttgcgaaaagcaactgattcgtatggatgccggcccttagactctaccgttggggtagcctccgtagcctcggttgccaccgtacacattcgctccgttcgaccgtccatactggctgttgttgtcgtacacatcacgaccatcgtaggcgcccgcgttcgattggccatatccataaccagctccggcggcaccactggaataggtggggtagttttcgttcctcaggttgtcactgctgccctgtcgaccccagtactcctggtacgtctcgtaacgcgagccactagtcgggttactgtcacggcttgagttgtcagggtaactcgagctgtcgggatagctcggatagcccgggttgttcccactcgggtagccgctgctagctgactggtatgctggcggtgcactcgaagcgttttggcgactgtagtctgagtcgtaacttgggtatgtctcggcattgcagttgctttcttcacgaacaggataagccgagccattgttgccagcatcgtaccttggagcgttgctgtcgttcaggtttatcttcgagaacgacccgtgcatgtcgccttcagcgctagtgtcgggattagtgtcaggataagacgccgggttgtggtggggactctctgactggttcttcgggctctcgctgtggtgcgaaagcttctcctgcttcttcttcttcttctcgtcgtccgagctggagctggagcttgctctggatctcgagtgctcgttgttttccttggccttgacctcctcgaccttcttctcctccttaacctgtccgggcttgtctccttgcttggccaaaaagtcctcagccgcctccacggccttgtccaccacggacttgtccttcttctcctcgtagccaggcttgagtttctcctcctccctcttggccacgcgcttctgggcgaactcgaccaccttgtccttggcgtggtacttctcggccgcctccatggccttggagaagatcgagtcgctcttcttcttgtcatcggcggcgctactcttgctcgagtcaccgccgcccgcgtacttctccgccgcctccttggccttgttgaaaaagtccatgacgatgttccctcctgtcaatcaccgcctgccgcgttcgcgccgaaagctgaaatgacccggtggcggcaaatccacatggccgcagcgtctcatacacgcggccaggacagcacgtgggtgaactctcataccgcaatggaaggtgttggactacaatgtagtactcatgtcatgatgtattatccagggtaagcttatcctgaccttcttcacctagatctacacgccgtagttgtaggctccgtagctttggttgctgctcatctgcagctcacgactgccatacacgccaccagcaggacggccctggaactcgcactcgtctgaggggtaccctcgtgaagtaagcttactgcgagatgagtagctcacttcctcttcgacgcgtgacgagtattcatcaccaaagttgcctgttggacgacggtactcgttggagtcatcccgcgacgtcctgctgtaggacaagtattcctccgtctcgcacccatccgcgtctcgaactcgagttgtggagcggtactcggagctgctggacacgtcgccgtagctgtcgccgtccctccggtagctcgagctgctgtagttttgcgtcgagttgttgcggtactcgggggttgaagtggtgcgaacagagacgttgacctcctcgtcaacgcgagtcgagtagtccgagttgtctcgcgtgttcctgctgtaggacgagttctcgttcctcccgtagtcgccgtcatcacgcgctcgagtcgagcggtactcggtctcgctgctctccagcgtcatccggttgaatgcgtcacagttgtcgtcctcgcggacggttcgctggtagctcgagctgttgtactcccgaccggaacctcccatgtactcgggacgcgtagtgcgggcggagtagtccacttcttcgtcgacgcgggccgagcaggtcgacgaggctccaccatagcagccttccgagtcgtcccgcgacgtcctgctgtaggacgacgagtactccttcctctcgtactcgtctccgtcgcggatttgagttgaacggtactccgaagtgctggagacagcgttgctctccatcgggggcgcaccgtagctgccagcttgcggcacgacgctaggatagctcgagccgttgtagacattgctcggatattcggggcgagccgaatagctcacttcttcgtcgacgcgggtcgagtaggacgacgaagcaccaccgtagtagccgtctgagtcgtccctcgacgtcttgctgtaggacgaggtgtactccttctgctcgtacccgtctccgttgcggacttgagtcgaacggtactcggagctgctcgacacatcgttgttaaaggccccgtagttgtcgccgtgacggtagctggagctgccgtagttctgggtcgagacgccggggtattcgggctccgtggtggtgcgaacggagacggtcacctcctcttctacgcgggtgccggtacccgcgatctctcgcgatgtcttggtgtaggtcgagtactccttcgtctcgcactccgagtcggagctggagctgcagtcatcgtcgtcctgcttggcgatgaattcctctgcagcctcgacggccttctccaccatggacttgggcttctcgacgtaccctggctggcaccgctccatcttccgctccgcgaccctctcctgcgcaaagtcctccaccttcttggcggcctcgaacaaaaagcccatagttcctaagtgtagttgttcttgatgtggcaaaagctgaaatgaaccgaccgaggggtgatcaatgagcgcatgcgtaggcaaagccagatgaggcacactcgaggcgtgggtgaactttgctgatgagctgaaaggccaaaagcagcaaaatcaaggccagcgctcgaacagcaatggcattctcagttgctttaaccagttcgtggtactctctgcacgcgtttgatgcttgtcacacacttgtgacaccagagctcgccaatcgtcttcaacgtggagagttatgaatatatgaaatgctcgggctggtaaacaaaccttcaagctcaaatgattagatagatagatgtagcgactgttgttcctactgatctcactctctccttcgctacgctcaatatcctgccagccatggtctgcccttgtgctcgtccacgcttagtcgtagttgctgtcccccgacccgtagctcccgaagccttggttgccgccggacgtgcgcgttccactcgagcgaccggagtggccggcactgccgcgcattccacgcgaacccccgcccatgtctccgctctcgtcgtccccagtggctccactgtcgtcgtcgtcgttgtcgcccgatcgacgcgaatgcttcttcgagccttggtgcttcgagcccgagccgctgccgtacgtatcgctgcccccgtaggacccagagccataggtgtcgttgtctccgccgatacccgagtagctctggttgtcgtcgccaaagccaccggagtacccagtcgtgcttctctcgccgcccagcccggtggtggtgccactgcccccgcgagacgagtaggacgacgacgtgtccgggtcgtttttgctgcgatcgtacgggtcgtcgtcggtgtcacgcgagtagctcttggtgccagcgtccggctccccgcgcgcatcggacgaacggtaggccgagccagattctggaccgtcgtcgttgttgctgcctcgggccttgcccccggtggccttgtcgattgcgcttcgaatcgcctccatcttggtgggtcttgcgcgtccaattcagttgtgagcttggagaggagcttgaaagaagcctcggagaatggcggccacattgaggctgccaactacgcttggtcccagtggttgtcgctagcgattccacctgaggcatagctcgtcccattcacatcttcaaccaaaagaatcttgacgaaagtgctgtggttcaattcaaacggtaagagaggtagctacacatcgaggtggctaaagaggattagtgtttctttgtgtacttctcgacggcgtccttggccttgtcgaagatggagtcgtcgtcgtgcttgtctttcttgtgcgagtgcgagtgcgagtctccgtggcccgtgtacttgcccaccatctccttggccttgtccagcaccgactcgtcctggttgtccttcttgtgcgagtgcgagtgcgagtgcgagtgcgagtcgccgtggcccgtgtacttgccgaccgcctccttggccttgtccagcagcgactcgtcctggttgtcgtggtggtggtgcttcttcttggagaagccgtggtcctcggcgtagtccttggccgcgtgcttcatggccatcttctgcgcctcgtgcttgaggtggtgcagctttgattcgtccttgtggccgtggctgctgtgcgagtcgccgtggcccgtgtacttctccgccgcctccttggccttgttcagcatcgagtccatcgttgcggtaggtggttagttaattaaatcgtcgggtgtcgggagtccggcagaatggaaagtgagccaatgtatccgaagtacgcacgcctccacctttcccgacagatagctctccatctgtgctcaaacagcctcttagataccaggtaaatcagccgcgtgccgatcctggctcggctggatcttcctcctccgtccgttcacgccaagctgaacacgcgcacatgccctgcaagtaatctcagcattaggacagctgcaaagtctacagtcaaacttccttatgctgtattcgaccgctttagttttgtatcgtcttagtgcttcttgcctagtgcgtctttggccttgccaaacatggcatccatctgattgtccttcttgtcgccagagtggtggggcttaggctgtccctgcttggcgaggaagtcctcggccgcctccacggccttgtcgacggtcgacttgtccttcttctcgacgtacccgtgctggtgcttctcgccctccctcttggcgacccgcttctgggcgaactcgaccgccttctccttggcgtgatacttgtcggccgcgtctttggccttggagaagatcgagtcgctcttcttgctgttgctgtgactgctgctgctgctgctgctggagtcgccgccgcgtactattccactgcctgcttggccttgttgaagaagtccatgctgcgcttgagtgagtgtagatcgattaaagctttcgcttgtgtgtccaaaggcggaataagtgaggaagctggctgcatgttgtggtgccgcctctccgcgcaaatccagatgatgcagcgtcgcataacacgcggcgatggatacttgacgcccatggacatccatgccgctattagctgtaggacatgtaggagggaagagttgatgaggctggtgaacgaacgacaaagacctcattgaaaaggattatcctaacttgctgtctttgcaggcggagattcggcgctgcagcaccgggaagttgacgttgctcatcgacgcgcgtgtgactcagctggattccttcgactcgctcttctttgggtcttgcggttgagctgcttggcgcgcccgagcggtgaagacgccctcctgcgttcgagccgtgatgcccgcctctagctgcaatgcccgagctcgcgcccgaatttcatgttcccgaactcgcaccagcagtgtacgaagtcgcatctgcagaaccctagactccgcctgcgttatccgagactccgcttggcttatcagagatcgcgcccgcattaaacgaacttgagctgcctgcagcaattcccgagctggatccgtggtgccagaactgcaagatccaaccgtctaatgcagatcgacaaaaagcgacttaaggcaaaaacgagattgttgctaggcttactaccgtactactagtacgcctacgttactagacagggggcactacttcacttggtcgcagtcttcggttcttgctcttgatcatcaagcggtagcgtcaacagcattaaactccgctcactccatcgtgggcaacctcagcctgtcgggctttagccatgagcgcgcgacgagtggtaggtgggattgtttgggtttagctggttggcgcggttgtcgaccgccgcctgcgagtgtccggaacctccacctccaccactgcccttcgacgcagacccgctcgaagtcccgcccttcgatccaccaccacctgctttggtcatcgtcttcttctttgtgtgtttcttcttttccatgagtcttcttctgccgtccagccagcgaattcgtttgtgaggcgcgtcaggttgccgcccacttcatcttcttcggtttgagaagaatgaagttgtttggcttgtcccgcgtggttccaacggctgcatgacgatatgcgagtgtactccactaacatgttagctgattctactggacactagctaacagttagttgaaaaactacacatgttagctacactgtatagtggaggaaatgggtacatgagaagattacttagtaatctgtacgaaagcgtatttactagctggtctgggtgcttatattgcaccgcggactttgacataggtaggaggcgcctaagtcgtcttcactcttaaaatcggtcatcgtctgcgctgataagtggtgtgacagccccccatgtgagcttcacccagcaaatgtttccctatgttagcagattcttcaaagtattatagattgaatggtaaaatcttagttttgagggtgtatttgtgttcagtttgatacatcgcccttctcggctgccttcggtgcaaacatatactcttcccttacttttgctctaacgctactaacatgttagctcaaaatactagacactaactaacagttagctaacatgtaaagcaactaacatgtcagcgttagggagtacactaacgatatgcgagtcgcattatgcgtgcatcaaatgaaccactcaagatcgttagccctgcctgcaaaagctggccaaataccacgcgctgcttcaccgcgatatgaatgtaccggtaagagaatcatactagtacttctccaaactgaagacgcttgggaagtttggtttgttatgcaatcgtagtgttcagctctaaaaacgtgtgttcgagttatacagtatgtatttatcgcgcttgaaaatgtacggagctttgctacaggtacacatgtggtccgtctcagcaaaacttgcacttatgtactcccgaaccagcgaagattgacgattagcgcctttgaaaacagagtgcaatcccagtcaaacagcgaacaaggatgtacagtacagtacatacaattatccgctggatcaaaggctcaaaggatctacatgtaccagtacacttcaacctgcagacctcctgtcggaacagatctcaagcgcatcatgcattttctatttgccacacgatctggttcgcttccaagcgctcctcctcactgaggagtcctcagcagcctcttattaccactttcgctttcaagagctcgcaagcaatgaaggctgccttcgtcactctctgtgcggttgcattccttactccttcgtcgtccgatgccattcagtctccaacccaccgccaactgatcctggaagggtcaatcgtcccagccaagaccaagacgtacacggttggcctccgccactcggttgacggcgagaacgtctgcggcgggtccctcatcggcccgaagcacgttctcacggcgtcgcagtgcgcctcgtacgacatccgctgggcgtcgatcgggtcgcactacctcaatgggacggaagacagcgagcagatcaaggtcttgtcggtcatgaacaacccaaatttctcggctaacgtcgcgtacagcgacgacttcgcgctcttggagctggaatccgcgagcgctttcaaacccgtgaagctcgcatcgtcagacgactcggatttcaaggcgggggctacagctacagcgcttggatgggggttcacggctgaggagggcacgatgtccgaggaactgcgacgggttgacttgcctctcatcagcgagaagagctgcgcgcaggtttcgaccattgacgattcgatgctgtgtgctggaggattgatcagcgaggatgtctgcagtggcgatactggaggcccgttagttgttgagtcgagccgtggagacgtcctcattggcgtcgtgagctggcgcagcgacaacgcctgcggacggggcccctcatatccaggaatgtactcacgagtctccagtgctcgtggctggatcgacccgatcatcagcagctcctgcttcgactaaacctttgagatataacgttagtactgtatttgtctttcgttttacgcaccccacgcctctgaatcgccctacgaagagaccacgatctcctccatgagcgtgagattcctcgcaatgccctcagcgccactgaccaggcagttaagcaacagcagctcctccatggtcacgcgcttgaagcgctggccctccatgagccactcgacgtacgcagacttcatctgagccgcgatgtcgctcgtactgaagtcctcgacgttcaagacgtcgtggttgcgtcgaatgggcgacgtcatcatggtcgaggctcgcctcatattgaagcccgacttcttcggcgtgttctgcgctgaagacacggcactgaggatccgtccctccttcctgggggtgttcgagtcgaacatgctggcggtgatcttgttcattcccgtgccgttcgaggacgtgacgctgcagctgaccctggatgctcgagaaccagcgtgagaagcaccgtgaccgtcctcgttgatgctggacagcgcctgcttcagtgtggtcgtagccttgggcttgcggcggtgatagacctccacctcgagcttcagtccgtcctccagcgccgccatgaactcctcgaacgacactttgccgctgcagtccttgtccacgacctccatgaagtccgcgacgtacttggtgatctcctcctgctttacagcacccgactgagcgaagatggtctccagcatgaccgccacctcgtccgcgtcgatctcaccgctgcagtccttgtccgcgactcggaacgcctccttcatctgcatgaagatggccgtctggtccgggtccgagtacaggaacgactcgccgaacagcatctgcagcgtgttgaacgtgtcgtccactgccgacaggaactggttgctggcctcctgccacttggtgtgcgtcgtcttgccgccgttcgtgtcgaacacacgcgcgctctccgtctcgttgtcgcggatgtccacagtgttggtctgcgccaagttctgcttcgtccggtagttgtaccagcgcacgagcttaaacagcaagttgttgttattcagcaacctgttcgtactctcaaagaccgcctcgtacttctgcttggagaacgccgggcgccacatctgcggctccgtctcggcctctttcagcagcgcctgctgctccactagctgcgcggggatctgcacctggaggatgtctcgaacctcctccatcgtctcgtcactcatctcgccggagctcgagaggtggtggccgaacagaatctcaaaggccttctgctgtagcttcagagtctgctggatgttcttacgcagcagactcgaggcgctctcggggcacatggccatttccagcacgatgatgagcacgagacccacggaagtctgtgcgagactcgagtacgagctgatggcgatggcggacgagccgtccgagctgtcggtgtagcacacgtcggtctgacggagcaggacgccagcggcgatgaaggccgacaccagaccggcgtacgagctgtagccctcgacgaacttgacgtacatggagagcgtcacccacacgaagagcaccaagtcggacaggaagacgttcagggcctgagggttgcagatctgcgagatgaagaactggaacacggacggcaccacgctgccagccacgacgccgcccactcggttcaacgtcacggagaaggagcctccgatgtgattccccatgacgtacgacacggcggcgggggtcgtggagctgaagccgtagaggtacacagccatgaaaataccgatgacgatggccacggccatacgcgcagactccaggatgcgcgcgcgagtgtaccggttgatcatgaagaagttcttgatcgaggcggacacgaacgagcgcgcgcgtcgacctccgtggaaatccttctcgttgtgtttgtcttggaactcaatgagagtactgcagaaggagttgagcgagaagaggaacagattcaacgacacgttgccctccacgtccttgatcttgactttgctcgactgcaggagacggatctgcgcctctcggtagtgcaccaacgtgtgctccatctgacgttgcagagttttgatcgaccggagatcgagctctaatgaaataaacaaagaaaaagttagaaacggaggtagaatggtgtagaacatgtagaatacgtacgctcggaggaagcgtggatctcgcccgagatctcgttcagtaggtcgcccgaccgcatctggatgacgtagatctcgcgctgcagcaccttcatgtacatgaagtgcagctggtcgtactgctcgagttgcatggcattgttgagcgaccgcaagtctgcaatgagcgagccaatgagacgcacgtagtttttggcgacggagcggttgaacttgaaaaagaggtggaagccgaagagctgctcccaccacacgtcctccaggagcttgaccatgcgacggtggcgggccgctgcggcgtcgaacttgcgttgaagcttgagtttcaggaagttcatgtgatccacgttcttgttcttgaagcagtacgagtccacaatgacgttgagcagatccaagacgtcacccgaggcgttcttcgtctcgtcgaggagcttcgcaatggcactgttcataacaaaggagattggttagttccaagactacgaagagaactattccaaaattctggttaggatactcacaaaatcgggtaggggatgaacatgatgatgagcgaaatgagagttcccacgaatcccaccatgaagtacatcgccagattgttgagaatgttgctcgtctcgaagtagttgtcattcgaagccttcagcttggaggagtccagaggatccgtcgggttaatgatcgtcagcgctaaaaatcagcataaaacgttagtttccaattctgtgaaagaaatgagaaatcgagaaaaacgtactgaagtagaggttgttggccagtgcgaacttcttggtgttggtttccagcggcatgaggaggatgacgaccgtgaagatgaccatccacggcagaacagcgtagaagttgtgcgagttgacgtagtagtcgctcgagccaaaggacatcttcttcgagatcaggacgtagccgtcgtacgagtcactgaacgtgtgcacgttcacgaacgagaagagcagcaggttgtacaccaacgccatgcccacgccgtagaacgcctggcagacttgagtcagcgtcgcaccgacgttcttaccggccgaaaagatgacagccacagcgcagtagctcagaccgcccaggtagtaccaatccgggaagaagaaccacttcttgtcgtgctcaatggccgggtcgtagtttgggtcgcggatctgaatgaacgaagcgatcaccacaccacacgccactcgaagcgaaagctcagcgttgaagcggaactcggctacaacaacatcctcaagcttagtgcgagagctcgaagactcgacgatgtgatacatagagacttacaagaaaacatttgcgccttgatcgacttcttctggtcgttgtccatgtcgatgtgcaggttggcgcctttgtcgttgaagtcttcacttccgatggtgcctgtgcggaggcgaaccgcaggaggactcgccatttcgtcatagccctcgtcgttcaacggcaccatggtgatcctgtgaccaaatacgtaggaaaacacgatcgtgagattcatcgtcgatagcgcacaaaactgcaataatctctcactctttctcgcccgtggggatgttgacctggcgcttgtcgacgtccgccatggtttcggaacccccgtgctgtcaattgaaccgggtgccttgcctccgcctagcaaaatccaaaagtgccgtgatcgatgcgagagcgttgagggtaaatcgagccacgagtccgcggccgctctctgacgctgggcggcagcgtaagaaatgcactggatgaggacacgggcgctgctgactcttgagatcccctctccactgccattcatctacgctctttgcacctgatgcgttggggtaagtcgcaccatgtgacctgccctactcgcacgcagatggccaagctgccaccaacgcccgcccccagctggccaactcgaccaaaacgataggattcctggcatcttcacgtcgagcattctcgaatccaggctcaagggtgctggacaatgccatgggatttattataggcgaggtgtattcatacaggtactgactggaacggcggtgacaaggatcgttgagacggatcaaacgcttggcgcactgtcgtcacttcgtgtttgtccttcgtgccatcgtggcaggattttagtcgaaagcggtccacgttgtacacgcacagctctgtgttgcaggctttccaccagcaaaataattcaccggtggttgtgcgctctgagcctgctctcaagcaccgcaaaccttgtggtaaagggctttaatacctgctacgttgtccaactgcgaaggcgtcatgctcagtctgaagcatatgcagcgcctcgacatctgctccacgaggtccgaatctgtagcttgcgcgccagcaccacgtcgatgtcgcagaaccctgggcgatctccgttggcctgggcgttggtcagtcgaacttctacactgtaccgtgtcaagagcgaccgaggggctgtgggtgcgagttatggtcgccgctggactacagcccacgtgcagggtgtccgatcagctcgcgcaaggcaccttcggatcctgccaccacgtgagcgagctgctggccgtgcaggccaaccgccgcgtatggtacggagccatccgaaacacaagaaatccgcctcaacatgaaatccgccacaacacggagcagtgtccgttagaaatgttacaaagggagagacccccgcgtgtcgtggtgttactagctgcgatagctttggactaacgcatcgactccccgcagcgttgttgttgcgacctccgtgacccagctcctggcttcgaggagctcgatgaggacgagggttcgaagacgctttgacaggcttgaggacaacttcgagcagacaggggtcccaacagacgaggcgggtaattgggtcggcgctaacgaaattgcctagctgcactggcatggccagcgttgcagcagctgcagggctacggtagtccaaatccgtttgtgcgcagatattgactacagccaacaacaactcgcacattccagaatctgcaaggatatggcgccgatgactatcaactgtgccatcgtcggtgtcgcggggtacgcattccctgtgaagatcgacacggacaaaagtcaagtcggtaggtcacttaaagcaggcgatccacgaccagaagccgcttccggtcacgtatgaagccgacaagctgcagctcttcctggcgaagacagaagacggcgcgtggttgaactctaaggaccctcttgtgctctgtatgccggaagggagattgcccctgtgaggtaaagagtctctacatgaaggaggaactgggagacccgacgcacaagatcagcaagaagttccccagcgatctaggtgatccacgtgcttgtggtagtacctggtattgtacacgaagatgtcgtctggtacggatcggttggggaagatattcatctaaacgatgaaagaacacttgcgcggagcgctttaactgcagacatcatcgaccggctggacgagacgcacgtagtgctggtccaaagtccaccaatgactgggaaaacgtcactggcgacgctactatgccaggctctggttaataaacacaaggaggagaagaagaaggcggtggtgtgcagcttttcggtggcggggatgttcgagaacgagacttttgagggtttcttcaagaatcgttgcaagctcgactgggtacacgcaaagggggcccttccaacacgagaccgtgcggtctatctgatactcgatgaagcgcagttggtctacaacgacttggcttcgacctttattgctttctgggagctggtcaagcttgttcagattgatgctgcataccaggtgaggatcgtcatgtttgcagattacggcttcaatgtggagcacactcgacacggtacttcgatcggatgcgacgatcgaatggtgttcgggatcaatgaactaaactttaggcctgccgaagtattcgagtatatcaccaagtggttcaaaggcgccaaaggattatcgtcgtctgcgatgaagactttttgcaccacagtgcaagagctgacgggtggacacgtcggtctgtgcacgagtgtcattgatgcactcaacaaagtgtatgaaaagaattggagtgatcctccgtcggctaaaacatggatccgaatgctacaaggagggtggctgtatgaaccagacaacggggcgctgtttgaagcattggcacaaacccgtgcggtgaaggtactggaaactctaagagtcgaggatctggatcgactcgaacgcgctgtttgtggtgtcaatccgtggtcgaacggtgatatagtcgagcagtgtcttcacaatggcattttggttcgaagtgaatggcaattaaacttctcgtcgccagtcatgtggagatacttcgtcaagctgcgcgttggtcgcatgcctcgagcacttgacgttcccaaatcactaccagagatgatcgctcgagtgatggaagcgatgaattacactaacgttcgccaggaactttgcagaacgtttttgcccaacgacataggtatccccgcatggcaactggagttttacaaggctgtctatcgctgtacaccgagctcttttgtgacgtctgccgacgtgggcgcgttgttcggagccagtgggtttattgactttacgattgcttcaggcggcctgttgtggggcatcgaattgctgcgagaggcgagcaacttggccgagagcattgagcgattttcgcccggtggtcgctactcctcgctaggattgaccgagttctgtctggttgacttccggtgtgttgcttctatcgacggtgacgagatgaaacgcatcgcagcagatatgcgtctttccaaaaacctttctgtcgtgtgtatgacgcacgaatgacgagtatggtggtgttcaatccgacttgggggtcgtctaccaggctttgggtcaacatgatttcgtcaaagtagggataaaacgaaagcactccgatcagtgagtcaggggcttctaccgtaggtgcgtgtccgcacgggcacgccatcttttggcgggattgcagctgagcgcgatcccgggagtagatagccagctaaaccgcaacaaattcaaattcaaactccgatcagtgagtagaaaatcttctgctagtctggtattttttttcagttttagtgtatgaacaatctacagattactgacttgcgctttgactttgacttgcggcttgacgccttgtcgtgctttcggtttgttgagtctgcttgtcttcgcagaagttccgccctcattcgaggctgcagacttgatttctgcgaggaggttcttccggataccctctcgcgatcgaaacggggattcctcaagtcgctgccctgcacctgggagctcgaacaagtctagcagcgcgacgagagccccaataccaacgtctttccactccgcaggcgagtacttgaggtaaagtcgagtgccgctcgtcggggcagtttgtctcggcatccgcagactctcggactgaacgcgtttcgccaaccctttcgagcttgagcagcgttttgaagcccctgcaccggagattgacgctacagtcggagatgatgtggatgctaccagactggaagctcggagattgcggcgaccttcgttgtagttgcactcgatcgtgtacacgtacgtgagccccgtggcgcggtacagggccacgcgactcgagccttgtcgcgatgtggtggcattgttgttatctcggaggtcgcgcttggtcatgttgtccttgtcgaacaagcacgccatgtagtcgaagaacggcgtgtgtagccccacgagacgcgcgtagagctgtgtcttgatttggcgagtgatagcagtctccatggcttcgttattgttgtcaatgagggcgtcggggaggtggttgttgccgaagatgaagcagccacggcgattcgcgtgcgcgtgcaggtcgagatagacgacgttctcctgcgcgaactgagagtcagcacctccatagtcaccaacgatctggaggagaaagtccttcagagcgtacactgtcggggcggtctcgagttgcgcgtcttcatacactcgattcaaattgacgccgcgcgtatccgtgcggtagaacccttggcacacaccgtcggggttcagcatagggataatcttgaaaacaaagtgacgacgtagtgcaatagcgctctcgtcggtggggtgcagcagtaactgaaacatgccatccagcatgaaatttgcgggcgtctcgcctgagtgaacacgcgcagagatgacgaccattttcttctgcttcgggtcgaattggaacgcactctccgactgattgcactgagaagaacccgagctccgattcaggggccctcggttcgatgtgataccgtccatcgaagaaatagtgatcaagtccacccgcaagccttccagcgagcgggtcaacagctctcgatggtagtaaacattcaaaggtggtgccttttcgttgatcgcagtcgctggcgaagtctctggctgcaattccggtcgcgcaaatagtttatccatagctgcgagctcctcctgcaccctcgtgtacgtgtatggatagcagaacgcgaacctcacgcgctctcgtgcaaacttgaaccggtacgtaaacgacactcgaatcttcaactcctgcttcctctccgacgctgtagtatcccctaccaaactcttctggggaccggcagcctcgtggccgctctcccctccgtcctcatcattcccctgttgagtctccaagtcctccccgtccaccgtagaatcttctcctagttccggtgtctggcccacaggcaccgagtacttctcaaacgccaacggggagggtagtctcgcccaccgtttctcgtcctggaagacacaagccgatgacgcaagggtagaatccccaccatccaccacttccaccgagctgtacatgacggtgtagccattcttgaacagtcctcgctgcggattgaggttggccagaaccagttgcagttcttgcagttgcttggtaggcttgctctcctttgtgtcgtcggccggtcgtcgttctacctcgaagtagaaccacgtagagtagcccgtggcgatgccgaacgccgccgcgtcctccgacactttgacgctgaaagccccggacgccagttgctccacactcgccatgttgccgccgtcgaagcgcgacgagaagagcagcccgcgctctgggaattgccactcggtcttgcctgggcccgtagtcgccacacgacgtagaaccgaggcctcatcagcatcgtcggaagcgcgggggacggtctccattacgggatcacctctctgcccttcaacaagctgtcaagtggtacactattggtacacctcactgtcatttctaaatggtttctatttctaatcaacttatttgaggcgtttctattcgaagcgcctcacaatctattgtctgagacagtgaccggtcactctttggaacaagggggagaatccttcctccagctcggtgcgtgctccttcctgcgctctctgtgcgggtctgcagggcgccgcagttgctctctgcagctgcatctcctccctacgcgtctaacctcccgcgccccgcgcttcccgcgtggaaatccgccctctaacgcgctcgttgtgccgccgaacccgcaggccagtcagtcgctcgtcggacggacggatcccatggcttccaccggcttcgcgccctccgccaacgggcgcacgggcttcagccgcaagcaggagcgcagcagcagcggccccgggctcaagctgggcgccaagaagaagaagatgaccatcaagcccttcaaggtcacgcccaagctgcccgaggccttcgaggaggacacgtgggccaagctgcaggccgccgtgcaggccgtacacgccaagcagacgtcggcgctcagcagggaggagctctaccgctccgtcgaggacatgtgcacgtggaagatggcggccaggtctgcaagacacatttttattattattattattttgtggatattttacttagtttttgataattgtgtttttaggctgtatacgaagctggaggagacgtgtgcggtgcatgtgcgtggccgagtggaggatctgctgcagtattcggctggagatatgaatttgttcctggaggcggtgcacaagctgtgggaggaccactgtgaagacatgctggtgatccgcacgatcttcctgtacttggaccgcacgtacgtgatgcagacgccccacatcgcgtccatttgggacatggggctgaaattggtgcgcgacaacctggtggaacgtcggagcttggagacgaagctcattgacgcgttgctggagctcgtcgagcacgagcgcaagggcgaggcgatcaaccgaagctacctgtacaacttgctgcggatgctgctgtcactgcatttgtaccatgccgactttgagacaccgttcctgacagcctcggagcggttttacctacaggaaggagccacgacggtcgagtcagcgagcgtgccacagttcctggtgcacgtcgagaagcgcctgcacgaggagaatgagcgcgtgaacaactatctggactcgtctaccaagaagcagctcatttcagtggtcgaaagcaagctgttgaagccccacgtagctacacttctggagcgcggcttcgagacgctgatggaggaaggccgggtcgaggacctgaagcgaatgtacgcacttttcgccagggtggatgcgattaacgacctcaagacggcattttccaactacatccagaagaacgtctcgaagctggtgatggatgaccagcaagagaagacttttgtagagaagatcctcaagctcaaggcggacttggacgcagtgttgagcgactcgttccagtcgaacacagacttctcgttcgcgatgaagtcggccatggagaatgcgatcaacgtccgtgcgaaccgtccagccgagctcgtggcaaagtttgtcgactccaagttgcgaactggcaacaagggcggctccgaggcggaggtggagaatcttttggaccgcgtcatggtgattttcaggtacattcaaggcaaggacgtgttcgaggcgttttacaagaaggatcttgctaagcgcctgctggtgggcaagagtgcatcatttgacctggagaagctgatgctgtcgaagctgaagacggagtgcggtagctcgtttacaaacaaggtgagtgttgaatatttccagagtgtgtgctgccattgctgagtgatgtttgccttttggtcacagctcgagggtatgttcaaggatatcgatctctctcaaaacgtgatgactcaattccagcaacacgctgctagcaggtatgatccacgcctactatttgtgctgggttttcccgtcaagacatactaacttacagttttgattcgtccagaaacgagttggaggccctgcacggaaaccgtggtatccctgacatgcaagtccaagtgttgacgaccggattctggcctccgtacgcggctgtcgagatcaacctcccggatgcactggtaccgctgaaggatattttcgacaagttctactcgtccaagtatcaaggccgtcagcttcagtggcaacactcgctcgcccagtgtgtggtaaaggctaccttcccttcgggcaaaaaggagctggtggtgtcgctgtaccagactgtggtcttgctttgcttcaacggagccgattcgttgggattcaaggagatcaaggagcagacgcgtattgaagatggcgagcttcgacggaccctgcagtcgctcgcatgcggtaaaacgcgcgtgttgcagaaggtgccgaagggcaaggacgtgaacgacgacgatttgtttgtatttaacagcaacttcacgaaccagttcatccgcatcaagatcaactcgatccagatgaaggagaccaagaaggagaacgaagacacccacgagcgtgtgttccgagaccgccagtaccaggtggacgcagctattgtgcgtatcatgaaggcgcgcaagaagctgtcgcacgcgctgctgatgacggagatcttcacgcaagttcgtttccccgcaaaggctgccgacatcaagcgccgtatcgaaagtctcatcgaccgagagtatctggagcgagaccaaaacaacgcccagatgtacaactatttagcgtgagcccaccactcacttacggcgcccgattccgccgaggcgaaaaagcttgctcgaagcgtctgcgatggcattgagagtccttgaactctgcgttggagtgcagaacgaagcaagcgttgtgcgcagtagcagataattgtaagttgggataatcgctcgcagttactaaataagggcgtagtcttcatcacattgcttcgtcttcgtcttcgtcactggagatgtcgtcacgtagacgatattgcagcaaaacggggaatattttacccagcgccttctccccttgtgcaggggactgcaccaacaatagaaaacacaacgcaggtcagtgaatgaactggtctgaccaaacatcatgagagcttttcttctgctgtacctcgcatcccgtgataacgattttgcccgatatgaagataagtaaagtacacttgggtcgcagcatgcggtaaatcagccctggaaacatttccggctcgtactgcggtacaaaagcacgcacatatcagactcatacccgtcatggaaccacacgcatagccaactcagctcactgtgctgaagcgcaggtggtctctcgccaagccttccagtcgtattctaaagccgacgtctgacgaccccaccacgttgcgaacagtgaacgggctgcagtcgctcggaaacgaaactttctgcagcaacacggcacatttaacacacacaaaaacacccacagattagcaagtggtttaggcttatagcctcctcgtatcccaacacaaccgaaaccaaccttgaaaatggagaccagtttgtctgctgccagcttggagtcgtccacactcgtagccccaatcaccacaaactacaagcaacacaccatacaatgtaactaaacagaccgcaatttctgtgagccagtgcacccgtgcaagccgcaccttgccgctcctgtagaccagcacagtcgcgcgtggctcctggaagcgcatcaccaacgcgctgaagctctgcagcaaacaaccattccacagttaaaaattacaccattattgcataataatttttaaatacaatgccgcgtactctgggcgcgtagtccgcattgcgcacgagcagcgcgagcttctcgatgttgactttgtcattgacgaagccgctgccgagcacgtttctgcggatgttgaggcggaaaagggtgaggttttgggtgggactaggaggtgcaggaggagcgctgtacgtacacgacgcggtaggccacgccttcctctgcgagccgcgcgggcgaccacacgggggcgtcgtcttcgtcctcgctgctgctgctgctgctccagttgctgacgctcatgattgaaaagtgatgcgacgtttcgcgattggctggtggagggaattcagtgatttcattggttgaaaatgggaggaaagtagataagacaccaagctgaaataccacagcaccttgatgctcaaggcttgagcaccttggcagtagcagtgtttgcaggagttccttgtattttgttaaacacagcgggttgtactttgaggtggattgacgacgggaagcttttaacccctaattaatcctcggcaccgcgtattggtgcttggactgcaactggctacacgctttggttgcatctactgccagtaggcagcatcagagccattatatgaatggacttcatgcacagcgagggccactacgggatctccctgagcgatggagtctatgcggtttgccgcgacgaagcgacctttatccatcatcaccacgagtgcaatatcggggtcactcatactcggaccgtccgagtcggacgtgtctgcgctcacagcaacaccaacaaccacgctacggggtggtggtcgcggcgcaggaatcaagagcgcatgggcttatctgcccgaccgtgcgaagttgccatcagagcaccgatagtccatcaatgccggcatgagcatgcgaggcacacatcaaggcgttgatgctgacccgatgtgccaaacaactgaaactttcagggcggaacggcaaatcctttcgccgtgcgtttatgtcgcttcgtgcactcggtctcaaggcactgcagtgccagccagccccgccctcgcctacgtgtagcgctttgccctacccgtgcactgctaataacgaaggcaagggcaagtccgtcgtcgctgtggcagttccggcaccggcaaatccacaccgccccgttatcagggcgattgctccgtcacagatggggaaaatgacagtatgcgtatgaatgtagtaggtaaatgcagaacccgtaatttgtgtgacagtacacgtatgcgggaaaccggagcgaaaacttatgctaaaggcgtgtaatagaatgccaccaagtgacaacaggcgtatggacgtacggcctcaagactgctacagaggcagcgcaccggctgcccatggcctccaaggacgagttgatgctggccacgaacagcaggacgatatggtgtacaccttccgctagatggtggcagcggtgccgggtagcagtgatgcgtagcttggctgcgtcacttccacgttttgctacccctcgacactactcttcgtctaggagtttacccttcacctcttcactgaaagccttcacggacacgatccaccaccactatggtcggcttttcagtccgtgcgagactctatgctggaaatcaaagaagcactcgcagtgccgaacccggcgatagggcttctgcggcgggcggcgcttgcgagatggtgcagtggagagggtcccgaagctcgaactgcgcgtcaccacgcagatcgcgacgtacgcgctgaacacgaacgacctgtgtatgggcatcaaccctgagtctgcgcctatcagcacggagagtctgccgcggctagtgctgtacatcaaattgtaaaccgtggtgcccacgagggacgggggacggtcgacagcgcgagtctgccacttatgggtaccaacttctagatcgtggagagatgcgcacgtcgatacggccacagaccgtggagtccaaggtgatcgggagctgggggcaggagctgagcacgcggtgaatacatgtagtacattagctggatcaagagggctacccactgcgcggtagttccaaagcgacagcttgcggcggatcctacgttccgcagcgccgtacacgcgatgcccgagctcatgctaccgcattgctcgacagcaatggtagctgcagagcgagttgatagttcgctattaccttagttcctagtgtatatacttgctatgacgtagtgtagatcattacacgcacgcgtcgctcggcttacgagacgcttgcttatagagttaatagactggaacgacgacggagtgaaaacaacgatggatgacgcagagcctccttttcctcctccgctaaactgcgcaggaagcacacgacgaggtgcgggatggcctgacagccgtcacacgcggcgtctctcgagtggggctccgtcttgctgctgagcgccatggccacgaaggcgttgcagaagctcttgagcaccttcttgcggcgctcgacgccggcgctaagcttgacgtagagccgcggccgcgacagcaagtagaggatgaagtgcatgtacttgctgcactacttgcagatgtggccgtcctcgtgcttgcgctgcacgaccaggcccaggcctggtaatagcgcagctcggcgaagtccgagaacctggtagtccggctgcgatgggctggccgtgggcgcgtcgggatgcgcgatgtgtggtgcagcaggaagacctccacgacgtattagtacagtagacgacgttattagtacagtagacgacgtcatgccgcacgacggtcgccttgatccgcttttcatttgtcagtagacgtatgcgcggtataattgagatctgtaggggtaggtatagctggtagctacgccttctgcatttaaaatccagtttcatacgagtcttgtcattttcccgtcacagcgtgcatgtgcgtgtctcgtcaaacctctagaaacgcggtcgcgaaatcctatgatagatgcgcgcgcacggttcagcgctgcttcgcgaggctgctgcatcgtgccattcgcgaactcgccgcccagtccgcactcgagtcctgccgtcgacgcctcactgccaacgtcgccctaccttctactaccagctcccacaccagccatgcagatcgctgtcgccctcgttgccaagcagaccgcgctcgcgctcatcccgcgcgttgtggtcatggctccggccctccaggtcgctgtcatgagcacgcagcgcactttgaccacgcaggcgcaggagaaccgccgccccgtgctcttccggttagtggccctagtccaatccattacttggagtctgaaagctaaccagtgtgctttgttccccctcattggacagtaaggacgacgagaaggaaatgcgcaagctgctgcggaagctgcaccttcaggcgtgctacagcgacaaggccggcttccgcgcccaggtcgagcacgacaagcagacgctgggtgagatccccggcctcgtgcccggcgtggacctgacccaggagcaggtggacgcgcttctcaactggaagcacctgtactaaagcgacgaggagtcaccaacggtcttcacacgggcgagaagcggagacctggctggattccgttgatacgggaccgcagccagccacccccgctcccagccccacatccgtctgggttcatctccgacgaggcagcctagcagctccaaccgtggggttgctactgctgtcgcccgccgccctggccccggcccacgtagacctcctcgctgcacgtacatgtccctacacccccgctccgctcgcgacgcggcccgcaacgacgatgctttacgtttggtagcagcatcctacaaccgattttggcagtgatccatcatcttgtagctctccatgtttttagttttttcacgcgctgatctagcgatggccgactcggaaatcaatagattttcaacatgcggactaaaggcgttggttgtgtgggttctggtgtttatgagctcacttgtccggagaaactgactgcagcgcacgttaatggataacgatagctgcagcattgtttgatgaaggcctaccggtagcctatgaaagcagcggcaccaccgtctgaaccatcggcactcgactgggctgcccgtgggcttcatcatagattccgtgcgggctgctggaagatcgccgggcgtttttggtcggttttggtgcctcttcaagatcggactatttgtttcttgcgaccgcacacaattctgccgcgcactatttgggcgtcttttgacttggagtctgtattggccacgttttacgccgccacatatggcgctcagtagggctaggcaactcgcagaccacggcggcgtgtcgaagactttgactcaaatctgccgacttcgacatgctcgctgccccaacgcacttcgcagtgcctgcttgcccaaggctatctatcatgctggaggagtcctccgaggacagcaacatcaccattgtccaactgaccatcgtcgctgggcactaatttgatgcgtgccgcaaaatcaatgaagtttacgccgcaaaaggtcagatcgcattgtagggctgccaccacttgcggagcgaaaatcttgcctcgagaaccacgacggagaagctgtgagaaggccgttgtgtaccaatgcatcggacagtagcagcagtaagcaggcaggcaggcaggctcgagtccctcggcgcgctcgtccacaaatgcgagcttgtggagctctctgcggctcatgtgcttgaagttgttttcccgtaaaaagtccgagacaatttacggggacacttctcgccgaccagagaccggtgcctccaatcctccgctgtatcagccgctctgtccctcccgtcggatcttttggtgctgtgtccgcgcacaatcgcccgctttcggctttttacgtaaaaagtcgtgcttgaagcgtgcggcggtcgtgtctttgccttggcaaagaggggggaaccaaaccgccagtacacaacatcagcatcaagtacccaaggaagaccatgctcgccgtccgccgtgccgccgccgccgtcccgaagcgcgcctttgcgtcgcccgtgcagtccatgggcctgtccaacctgcaggacaaggaaaaagccgccgaggccgtcttcttcaagtacgcccctacaaaacgccatatacttttggtctaccaaataagatcctaatcctttgttttacgcccacagcaagcaggacgagaaggcgctgcgcaagctgctgcagaagatgaagggccagaccgacgccgtggacaaggagggctacaagcaccacgtggagcacgacaagaagggcctgaaggagatccccggcctcaccttgagcgaggaacaggttaacgcgctgctcaagtggaagcaccagcagtaggccgctggctaggccgctgccccccttccatgtccgtatctcttctcgccaggctctaagaagacgcctctcctctcgtcgtcgctccattttcttgcttcggctccaactctacgcaactactatagccccgaagcagcaacagggcgaggcacaggaaaccaccatgaccccaatcaagagtcgacgacggtgacttgacacttcgtcagcaatttttatgcgtctcgcgccgcgttgcgttcgtgttttggcagccgtagacagggtgtccgcaaggaggagttgcaaatctacagcgagggcagcaggtcgaacggggagatgatataacgactggagggcagcaggagcagcagccgtgagcaagccgtaccggtacgaaacatacgcacccaacacacaaaacaaaaacaataaaaagctaattaacaaatctgtccgagctgcacttttgcattgcaaggtgctcggaagcggactcgacctgacgtcgtccagcgttcatatttcagagatgccatgtctacggtaagggcttgtttgcttgtaaaacaaacccagcgtcgacgtacttgaggtcgtggacaggccgttgcaagttgaagctggccagacgagtgcttgcacatgccattcgaggatcatcgggctgctattacatactgactgtgaacgcgcacctctctcagctcgactcgaacgcagcgatctccgcgttgaccttgttcagctccgcggcgatctcggtgcgctgcttggtcgcggtctcgagcatttgcttgaagcgattctgagcagatacataggcgtaagggtgcgttgtcacgtgagcagatgaacagcacctgtggtggaggcagtgggacttaccttgacgatgatgttggagttggcgtcgaccttggcactcaactcactcatgtcgcgctcggcatcgcgaaccgacttctgcagccgctcgcggatgggcaacagcttgagataggccgggtcagtcaagtattccttttgacgcggctccgccggcttggtttccataccgtccaggatatcgtcctccaacagatcgacatccttgtcgtcatcctggtcacggccagcagacgagttgagctgcataggtgacaacctggggcttggtgtcggcgcaaatgccggtgaacgctgcacagacgtccgcccgtccgtttgcgattcagcctccgagccgatatctgtggcaagtggcgtgttcatgatcgacgcgctggccgtacccggaaccgtgctgttccccgtgctcggtggcagcagcttttgcttcttggtagctggctcctctgatagtgtgaggtactcaggatgctctcgaatcaactccatttcgtctgtgactgtgattccattcgggtgctcatcgtccgccatccactcgtaaaagtccacgagctcctcgtgaacatcttcgatcgcaccgccggctataatcttgacgaggtcttcttctacacgagcgacgtcacctttctgggtaaaggagcacgaaaaaaaagagaatcataagccaaacagtgcaaactattgaaaaactaacttagacaagccgtacagggaatggtgtcgttttcttggtcttctcatactttcgcttgatcacgttggtattaggcggggtgattccgttcgtaacctcctcttgcgtctccagcagcttcctctcctcgtctttatccgtcaccacgaaaatctaacaaaaaataacaagcatcacactctttagcgaagaacttcgagcgttttgcaagacgctgcagcctgcacctgtccgatctcgccgctcttgtagaagaaattgtcgtcgtaggtcttgtgcgtctccagaatgcacggcaactgcgctgcagtcccacacgatcagcaaacaagcgtcagtgtctctgctgggctcgtgtcgaccaccaaaacgcagctcaacgcaccaatcttggcggggtactccttgccgttcacgtgcaacgtaaagtgcttgttatccgctgcgaaataaccgatacaacaccataaaacaagtcaaaactcaaccctctatactcgtcgtctctgcccgcgcatttctcctcctaaaatgccgccctccgcctcgtaaaacggcagcacacgcacctccagacactatgtcgacgttcgccgattcgccattcgcgatacccgcgcgcacctcctgcgccaggcgcttcgggagctgcagcaggtactgctccatgcttcgtcgggttaccgaaaggcgagtgaaagacccgcgtagccctgctctctcattggtcagaatatcgatcatcactcttcccgtaccccagatcccacttcgcgaccctccaggcaagtgcgcactcccgcatccgccttcaagcctgcactcgatcgactggagggaaggcgatggcgggcaagctgcaggtgaccaaggcccaggcgctggccgacgaggagaagcggccgctgctcgggggcgacgtgcacgtgacgctgcgccgccatgacgcgccggcatcttcgggtctcggagaccggtacccgtctcaggacgcgacgtgcatgtcgtccgcgctcttctcgtgggtcacgccgctcatggagctgggcaaccagcggccgctggagcacgacgacctgtacctgctggacccggccaaccgcgcgcacgaggtggccacggagttccgggcggcctggagcaagcagtgccgcaaggccaagcccagcctggcctgggcgctggcctcgtgcttcggcggccagatcgccaaggccgggctgctcaagctcgtgcacgactcgctgcagttcgtgggccccatgctgatcaaggagatcatcgcgtacctgcagaacccggacgcgccgctgagtgaggggctcatctacgcgggcgtcgtgttcgtctcgggcatcatgcagtcgttcttgctcaggaactacttcttccactgctttgaagccggcatgagagtgcgctcggccgtctgcacggccgtgtacagcaagagcttggtgctgtccgccgcggcgagacagaagaagacgacgggcgagatcaccaacttgatgtccatcgacgcccagaggttgcaggagctctcgacgttcatcaacagtgtgtggttctcgctcttccagattgtggtggcgtgctacttgctgtggaagcagatcggtcccgccacgtttgccggagtggctgtgatcatcttgatgctgccggttacggcgggcatctccaagctcatgcgccgcctgcagttgaagttgatggaggtgaaggacgaacgcattaagatttgcaatgaagtgctggcggggatgaaggtgatcaagctccaggcgtgggagcactcgttcaccaagcgtgtgctagaataccgcagcgaggagctcagcaagctgaaaacgtacatctacgcacgcagcggatcgatgacgctcttctcagcgatcccttcgctggtgacggtgacgtcattttacacctacgtcaagctgggcaacacgctggacgtcggtactgcattgacgtcgctggcgttgtttaacatcctccgcttcccgctgtttatgctgccgcaggtgctgaactcgattgttgaggcgagtgtgagtatcgaccgcttgagttcttacttccaggaagaggaacgtgagcaggtagggcccggagacctggagggtgttggtgtccgtgtgaaaaacgccgacttcatgtgggatactgcaccgggcgcatcgtcgtcttcggaggcgtcgtcgggttcacaagaggaggacagtttgctcaaggccgactcgattctggacaaggaagctggtgaaactctgccggtacttcagggtgtggcgctggaagcccgcccgggtgacttgattgctgtcgttggtcatgtgggcgccggaaagtcgacacttctcagtgccatactcggtgacgctcgatgcagtcgtggcgaggtgaacctgcgcggttcggttgcctacgtctctcagcagccatttattcagaatgcgacagttcgtgagaacatttgcttcggcctcccctttgacgaggctaagtatgctgaggctcttcgtgtaagctcaatgcaaaaggatttggctgtgctgcctggaggcgatctgacggagattggcgagaagggtatcaacctcagcggtggacagcgtacccgtgtagccattgcgcgtgcagtgtaccaggatgctgacatttacttgctggatgacattctgtcagctgtggacagccacgtgggtcatgatatcttcaaggagtgcattaagaagtgcctgaaggacaagctggtgatcctcgtcacgcatggtctaactttcctgagcgagtgtgacaagatcgtggtattggaaaacggcatgaacgtggaggatggctcctatgaagacctcatggaaaaggatggtgggcttctcatggatctggtggctaaatacaaagatcaagatcagcagcaggggcctaacatcatcgaagatgtcgaggacgtaatctcacttgatgaacttgaggaggatgaagaggacaacccgacgcccgagcgtctgggacgccgattgagtcggtcttctgtgcgcagcgaccgagccacgagtgacgcaggagctgaagctcaattgatgaccgatgaagatcgatctgtgggtgacgttgcctggcaagtgtacaagacgtggattatggcgtttggcgggatttccgccggtgtgcttgtgatcttcgtgttcatcgccacccaatttgtgaacttgctttccacgtggtggctttcgttctggtcggaacactcgcagccgaatgatgatgaagagcaacccgcagacccacagtcgcagatgttctacgtgtatgtgtacatgggtctgaacgcggtctacgctgcggcgctgtacgctcgtgctataacgacatacaagggaggtctccgcgcgagtcgatcacttttccaggatctgctggcccgcatcctgcgcgccccaacatcgttctttgacacaacacctactggccgtattgtgaatcgtctgtccaaggacgtgtacactgtcgacgagagcatccctgcaacatggagcatgctcctgaataccttcatcagtgtgttggtgacactggctactatttcgtacgtgacaccgattttcatgatcattctgctgcccgtgctggtgggctactacatctcgcagcgctactttatcaagtcatcgcgcgagctgcagcgactcgactcgatcagccgctcccctgtatttgcgttgttgtctgagacgctcgacggtttgccaactattcgtgcgtatcgtgccgagacccagttttccacgaagaacgaggagctgattgaccggaaccagcgcgcgtacttccttaactttgccgttaactgctggctggctctccgtcttgagtttgccggtacgcttattgcagcgtttgcggctctgactgcagtacttgctcacagctcggacccggaacgcggtgcagcttttgctggacttgcaggagtatcgctaacgtatgcgttcagtgtgacgcagtcgcttaattggtctgtacgtatgctgagccagcttcagacgcagatggtttcggtggaacgtatcaagaactacacggtgatggatacggaggctgcgcttacgagtgtcggcaagcttcctcctgctcaggaatggccgtccgctggtgcaattgaattccgtgatgtcaacctgcgttatcgccctggcctgccccgggtgttgcgcaacctctcactttccatccgtccccaggagaagattggaattgtgggtcgtactggcgccggcaagtcgagcctcgtggtggcgctgatgcgccttgtcgagcttgacagtggttcgatcgtcatcgatggactggacattagtaccatcggattgcacgagctccgcaacaagatctcaattatccctcaagaccccgttctcttttcgggcacggtgcgcagcaacgtggatccattcgatcagtacacggacgagcagatctggacgtcactgcgccgagctcatctcgcgcatgtggtgaccgcgctggacagtgctgtggacgaaaagggctccaacttcagcgtgggtgaacgtcagttgttgtgcatcgctcgcgctctgcttaaacgatcgcgcattattctcatggatgaggcgacagcgtctatcgacacggaaacggaccgcaagatccaacgcagcatccgcgaggagttccgtgagtgcacctgcctcacgatcgcgcaccgcatcaacactattctcgacgcagatcgtattcttgtcatggaacgcgggactgttggtgagttcgacaccccgaaggccctccagaagaagccggacggcctgttcaagggactcgtcgagcactggcaaaatgaaggaaagtgagggggatcctacagcatgaaggaaaggaatgagcaacggcgaagtactacaagtacttgaaacggagataaacgaaaaatacacacatgactttatcttaatcccttcgccggagtattttgagcggtactgagcctcgagcgtgcagtcgagatgacctggcaagaagaagttcacgctgaagaagatgtggaatgcggatccgctccagtgtgctccgacgttgaggaggcgatttatttgcttacgaagagggaccccgttgtctacgaccgagctgcattgacctggaggtgcttaattccggcaaaggcaagcatcgagacgcggttcggcaaggtatttatttgatctacgaggcatggagtgtgcatattaaagggctgctaacaggactcgcaggtgttgtgtctggtggttcgcaatcatgatggaactctggtttgctcacacccaagcggtgcagcgtatttatcggtgagtgcaactggaattaatagcgtaccaaaatcatgctaacgttcaccttagggctccaatgtgatagaaactcgtgaggtatggcgtatcttatcgttgatcttgggctttcaactgaggttggtgcaatcgtaagggtgttttcatggacgcaggcatgcagcgatcggataccgttgaggaggaatttgctggcgggagaatttctggtccaagagctacgcccgatcgcgggatcccgacgaaagtgcgtgcgctggatctccgaggctgccacatgggccctgacacagttacacagctgagtcgtggtctcacgaacaacgtacgtacagcttagagattgttgttgcgcttgcgcgagcatcttacgtactcacacggcgtgctgcaacgtgttctagcgctttgtgacgactttatctcttagcggtaaccacttacaggatggagatatggcgctgctggctagtgcacttgtacacaatggctgtctgttggagcttacacttagttacaatgctatcggcgaggttggctcgacctctttggccaaggcgctagcgatgaattcccacctgcgactacttgacctcatgcacaaccgaatcggtaaggacggcatcaccccgtggcttggggatacactgcgagtcaattatgcgctacgtgagcttaagctaagccacaacgctatcggagacaagaaaactgtcgacctacttcagtctctatcgcagaaacaactaacggaggaagaaaaactcaaagcccgcattgccaagcgtcgaagacacacgacaatggctgatggctcggaacctcacgacgataatgacccgttcaactcgacactgaggacactgcttctgagcaacactggaatttctgacgaagccgctacgcatcttgctcatatgctggcacacacgcgaacaatgacccatctggacatttcctgcaatgactttacaagtgaggggaacgtagagattgctcgtggcttgcagcgcaattcaacgctgcgttatttgaactatcgcgagaacaaattggatgaacgggcagcattggcactgttgaaggcgctgaaagtgcaatcttttgtcgaaattggacttttccagcattgctttgggagtgaatcaacagttggcagcgcattgggccagttcgtcaaaactactcgatcactaacgacactcgacttggtaagcgataattaaattggttgtaccttttgttcagtactggactgagtgatctaattgctgcaacagagtcactgtccgttggaacggcctggcgtggtagaattctaccatgccctcgcagaacagagcagtttgcacagtattgacctggtaacgtatagcgattctctgctggcatgaccacttgcgtactaattaatattcgactgcagacttgctcgggtcttaaatctgacagcgctgcgggtattcttgccaagtcactccaacaaaacatcactctgaccttcgtcaacctctcttacaacgagatcaccttgcgggggtgcaagttgcttcgagacggcgttgcagcacgaagtgagacagcagctcgactcgtactgtccctggagggcaattccggcgaaaagtgtccgacaggaactgttatcaccgggggaatgcggcccgtgaggccgccattaatccactgaaaacctgccggggtgccaaggaacagcttgaagctggcgtctaaaaattgagctgcagcttggaacactgtagtaattgaagttgtctgaaaggctttgctggaggtttagattcgtcaggattgacgcattacgtggcaggtgaaatgaacatggtctgaactggtcggaagagctgcaaatgctgcaaatgagcggcaccacgacggactcatcggaagtaagtggaggcacgttgctgttgcatttcgcaaagcgcaggtcctggatgcgacagtcgacggctcgtaaaactgtagggtgaacttgcccgcgcaagcaggtgattgccacgcccccaaactttggcaaccaacgttttgcttcaaaaggactggctgcgggtgcgatgcgtatgtaaacaaactctgaaggaatggaagagctgctgcaaacacggtgctttgatggtgggtcacttgaagcacccatccgcaaagttttctcccgcgatgcaaactacaccggatctccagcacgacagcgctggccgccgtgaaggttcaacctgagcctgaatgagcagcagcagtaactgcagtaactgcaggcgtgaaaccacgaaggaagtgtgggtagtgcatgtgctgtaggttgtcacgagcgtattcatattagacgttagtgtacattcatgttggcagcctagctacttcctagcatcctatcaccgttacagtcagagtttaatggctcaagctggatcgacatgcgccgcattcgcagcgtgcgaggttcccgcaggggaagtcgtcgaactcaagcgccaccaggttctcttcgtccgacgtgagggacgtggacgacgacgagcgcttgaaactggtcggcgacagggacatcgacgacgtcgtcgacgccgtggacgagtgcaccctggacaagtccttggtggtctggttgctgctggccacgaacactgcgaacaccttgctgacgtcgtcgcgcatccgcgagcagccgaggttgccgtggttcaccagcgacgccttgaccgtgttgagcatgcgcagcagagccacgcgggtgccctccacgccgctggggcagctcctgcagaacagcgaggcccgggggaagtgatgcttgatcacgttgcccagccacttgcactcggcgttgcagcggtggcccagccgcagcgccttgacgagtctccgtctcaagtcccggtactcgtcgaacggtcgggacaacgtccacgtcgtgacctcgtccttggacgtctggtaggccatgtgcagctcgtacagcacgttgcgcttgcccagtccgtgtcgggtgctggtggaggtggtcatttcgagggtcaggtgctccagccacgccaccgactcgggcagagccgacggtgtcgtggtgagttggcggttggaagagaacatttgagtcgagtcgagcgcttcgccttacggggtcgggagcgaatcgagaaatgagcgagcgacctacagggcgggcgggcgaggacatggacctgcgtcgcgcgtgatgacgagtcaaacccgtcgtcccaaggctcgagcctccaagggctcataatcccccgcatagagccccggtccacccaacgccgattcatgctctttcgtaagacggtacttagccccagaatgcctatcataagacagcgtcttgcgttttccgatcaacgcgttttgactacatcttggtttttgtataccagtggctacattgcatattgtctgtcaaaacataagacagtttgtcggacactagtttgcgccatacaattggccaaaagtgttcaggtcacagcggcatcgttgccgcggacgcggtggcaacgttgagcgccgaaacgatgcagttgcatggtgcggtagggtaagtagcctcttgttcacacacgaagcgatgtgcctgtagttggccgctggcagcaagcttaaatatcggcataatgactgcacgaacgcgtgcatggagtccgtggagctgttccactcagaggtgcagccgttgtagggcacggagttacgatgaagttggcagacgtaaactaagagggacaaatagctcgtaacggtactacatgtacattttaatgtagtaaattttatgcttgagcgtacatcatagtagttgtgaaggcgtggcagccagggaacggtgttgccaatgggcttcctgagatcctccaaccccctcttacctaatcattacagtccagcaacaaaatgcaaccacgtactctgcaacggcgataatacctagatcttatacctacgacgctgaggtgcggaggagctccacactgctgcgcgggcgctcggcgcgcgccatatcgctgctgggctcgaccttcggcatcggcgagttactcggtatctcctgcaactacgccactgcctgcagccatgctttttgtcgatgctacagcgtagactggtttgcgtatgcgcgctctatccgaatctccatcttctatgtagtgttagtactttactgtagaaaggagagttggcgtggtggggtgaacgacaacagtcgttcaccccagtaaagcgaagaaacattgctccactacgggaacaaacggtcgcatgataactgtgctatgatgtccttacattccattcctggcaagtatatttaaatcttctagcaggaggttagtgaatggcgtcaggatcaaaggcccggacatttcaaggggcatttttcaagtgcgctgcctctagtaaaggggtaaagggggcaaaatgcgcacacagataaatcagtccaatttacgagccgagatgcagcaacactcgagactacataatacaatattaaccaatgaaattgctacatttgatttgtcgtcaaactgtcttacgaatgctcgacacaagtgattgcgcgccaagggagcttgggcatcagcttgtaagacgcactgcggcccgaaatacaaagaaacgcgacgccttccgtagaccaagcagggaatctgtgcgtcagcgatttgcctatcgggagttgtgccagtcgcgaccttcaccttcaccaccgtggtgaccacgagggcgtgaagcaccgcgacactggcgcgatggagcacaaacctggcaggtttaacctgcgcgagatgcgcaaagagcacatcgtgtgtgagagcgcatgcgccctggaatattgatgcttggacgtatacacttacttgccctggcggtggttgaactgcagctcacggatattcatgcagttgtagatactatgctccatttgattcatgcaggtagcaggaaagtggcggtggcggtgactttgccgccgctggattcccccctgcgttaaatctgttgagtggttgctgcctgcggtaagtcgtggtggctggcagatctgagctgggagttcgaccagcgacagagcctgcgtagccttctccgacacacaagactgcgacagccgattgctatttggccgacatcatcatgatgatcatcgctacgcctacgagaagacacggcaaacgcttgttgttggatgctgtactgtatgtcgccgcgactacgtatcactcatcgagcgtgtctccaaaaagcaaagcctacttgcgcttggaccatcatacaaaatcgtaatctaccagctcacgacgcccgccaccgaattgacttcatgtacagtgcatgtacctttggtacggtatcccaggcccgaatgccaccgacacagttgatctgagcaagcttacaagaattgttgtggggctaagtccatgttaaaactaattcctgcatctcggtgagcctcagcttgttgctcatgcagtaacgaacttggagtccaattcttgggcccacacctgtttccgcgcaagacttgaaaaatatccaccgcgacgcacacgcgcgaatgtgtacattacgcgaaagcttgtcgcaccgtctgcaaaggcagtgaagctcgtcagtcacagtgagccgggcccacggtacatgtgcatgtatcatgagtttcctcgacggtagtcatgacaagaagcacattggtcaacgtagctttggcaaaacaatttttcacgcttaattaagcccgggcgacaagaggctgtcatttttgctaaccacgatcgatacggtcccaaagtgggcatcaccatgtgtttacaaaaaaattataaagccctcggctcgttttctggtcgctgggacacacgcgctcggccgcccttggactcaccaagggccttggtgagttgaggaatttggggggggggaaggattgtgcttgaaacgtgggtgtgtcaactatttttgaccggaggaggtggcactcgtccgttgtgcttcttctagcaccgcatcgatcatggcgccaaagaagaaggccaagaagtccaagaagtccagctcggctgcagatgcgggtgatggcggggttgacggagcttcggtgagcttttcaacatcttggtaagattctagtcacggtatcgctgacgtattgcgttctgcctattgcggtcgcatagctgatagacaacactcctccgattatcatcgaggcggacccaattcattacgtgacgctcgacatgcgagtacggtagctttgactcgccagcatcctctttggtcaacgtatatttgctaacgagctcgctcccctagctgctgaattggagttatctcaacttcaagtttcgcaccaagaccaccacgcgattgtttgccatcaaggtgagctggtgctacggcgaaatacgtcccgatttccccctaacattgggcactgtgctcgcagcaacaaattcaaaagcagcacggaccgatcaccgacctcaagatctgtaagggccatttctccgaggcgaacgaattaagacacgacatgatgactctggcagagtttggtattgaaggagcacccgaaggcgagccagaagcagtaagtctgctgcagtcaggaaatactagagtttatgcaattagactcaccaattgtgcttttattttctttgggtaggtctgcttgatacactacgacttcaaaccagagcagcacgacaacccgcttctccttgccacagagcagaactaacgcaataactccactgcactctatctagtacgcattttgaatcagtgcagcagtctactcttcttcatcttctcgagcgcagcaccgatgatctcaatcgccttggtcacagtttccttgttcgcctgtgagcccatgtggcccagacgcagcaccttgccattcagcggtccgtacgaacctccaaccagcagattctgggcgcggagctcttcctgcagcgcagcccagtcaccttccgggagctcaatagcagtcacagtgggggacgccgcgctctcctcgccgtaaaccttgagtcccagcgtctcctgcacctcacgacgcgcgaactcgctcacctccgcgtgtcgttgaataaccgcgtcgatgcctccctccttcttgatgttatcgcacgccaccagagcggcgcggatcgcctgccagttgtgcgtgtaaggcagcagacgcggctcctgctgcgccgcgcggtagaacggctgcagcgcgtcgtagcccacgtacttgacctcgttgatgcgcttccacgccttctcactcacagtcgtgaacgccaacgccgggggaccagacagcgccttgtgggggcctagcagacccaagtcgatcttccacgcgtccacgttcagcggcgctccgcccgcgctcgacacaaagtccacgaggaagagtccgtccgtcgtgtggttggccacaacttcccccacgccttccaggttgttgaggagaccgctgggcgtctcgcagtgtacggccgtcacaagcttggggtcggagcggcggatctcggcgcacagcgcgtccacgtcgatggacttgcgccagtcgcactccaccacgcgcacgtcggcgccgagcgccttggccatgtccgcaaagcccgcaccgaagaggccgttggcggcgcacaccaccacgtccccaggcttgagcgtgctcttgagcgcgccccagaggcacagcatggcctcgcccgactggatggccacgctgcagctctcggcgtgcaggaagtgctgcaggtcgcgctccagagcgaggtagtcgtcccagaaggccgggtccaggtcggacgagccgcacgcggaccccagcgccgccaggacgttgggcaacatctgcgacggcccggggacgagctccagcttgtcggtgctcgggtgcgccatctctcttggtctcgctcttgtgtgtcaaaaggcaactgcacctgtaacaagtgcgtggcgcacgtccagcggagaccgtgggatgcgttgcgcgactggcgtgtgattggtcgaaatttgagagagggagattttcaggtggacgctcgactggcaagacgccggcagcgtcctcttcaacgagacgtcacttgtcgggcttatagccctgccctcatggggagaaaccttctccatgatgaagacaattccactcgctgagtcgagcacgggcccaatatagtaaaatccatatcatctccatccatcccataaacaaactccccatccccgtagttaacatctccaccaattgctttatttcccaccaatccccttgcgccgtcaaagatgcggccgattgccctcattccattttgttcccaatagagagagatccaaagcctcaaccgtcgggaaccgctcgccgatgccgtcgctcccgctcctgctgctctccgcggccgccgcggcctcctccgcgctcgccgaccaagtcctggtcctcggcaacgcccccaccgcgcagttccacgcgtccgccgcctcctcctcctcctcctctccgtccttctccgccgcgggcctcgccgacctggcgctcgactccatcggcctgcgcacgggccgcgtgtccacgcgctccagtgccgtgcagagccccctgcaggccgacgtcttcacgcacagccaagcgtacgcgctgctgctattgggcgatgcgtcggcgggcgcgttggacgccgtcagcgccgccttcaacggcgccgcggccttccacgccgtgtacccatctcaggccgccagcgtcaaggtgccggccgcggtggcccaggagttccaagccaagcaccacgcgggcgtgcgctgcgccggcagcgccgcgctgtgtgcgagcgtggaagctgacgcgccgtccgtggccgcggagctggtgcaggaggtgctcaaggccaacagcttcttggacgccgctgacgccgcggacgtggcgtttgcccgcgagctggcgcaggtggcgcagctctcggcgcagctcaagcagcagacagagcagagcggcaagacgctgtacgtcgtgggggtctcggggctgcagggcgacaagcagaagagggcgcagcaggccgtggccaccacagtcgctgagtttttggctcaattgatgaagaagtcgggggctgcagcggcgcaggtgatgacgggcaagctgccggcggccacgcagcaggtggcggcgctctcgcgtcgcgcgcgcaacaggaagctggtgtcggggctcaccaatgaggacgaggaggaggaagaggaagaagaggagagcgacagtgccagtgccagtgacagtgacagtgacgacagtgacagtgaggagagtgatgaggacgaagacgaggaggtggtggacctgtccgcgcggagcggcagcgtctgggacgaggtgggcgacgacaactcgacgtccaagaccaacacgacggctgctggcgccgtctccatgcccgacatcgccgagttccagatcatcttgtggacgtcggtgctgcttggatctatgctgctgatggcggtgctggccatgggcaacatggacaccggccgcgacagtctgctctacgccaagttcatcgccgacgtgaacggccgcaagaccaactaagctttaagtctgctatggctatagctgcgccaatgtggaagcccctcggagttgaacaggaagcagcggtatagtttcggagcgagtaaaccctttaatatgcatcctttgcccctcaacaccggcgtcttcaaaggtaaatgcgtcctgttcgtccggactgccacactgatctttttggcctaactgactggagagtctccttggatcctgagaggacgcgttaagatgaagaaccacgacaacgatggagatcgccccgaagctgccgatgaagaaccagaggcgacgaatccatcgactacagagcaaggtgtgtccgaagaggtggggatcatggagtgatgcccttacagacgtgttttggctcgcagaagaccgtcgcctggcggaatttcaagcacggtgcgcgcagatgagagaggtaggcacatgttagccttttgtaaggcgttgatacatgctcaaatgtgttataagttgtgtagaagacgcagcgtgagcttgcgcggttggctcagcgccgggctgatgttcgggcgcaagttggcatctcgtcggtgacgatggaacaggtacacaagctttaaagacgtgacatggtaccaacgtgacagactgctaacgagtttgctgtagtggaagcaggagcaccaacaaatgctgcgatgcggaggaggttcacagtgatgatgaactcgcgctcgccttgttaaatatagtcgagttgcctgccacaacctggtttgctttgtatgcctttggttcatataattcttggaataagggatgccttcacggctacagagtgagctggatgccgccacccaagagaagatcaccgacctgttcgacaatgaggccatctgggaagcggacgacacggacggctacatcgtgcagctcttccaggagctcgaggctgccggggccagcatcgtcacgctcaaggaccaaggctggaactcgctgctgcacacggcgtcgctgtggaatcgccccaagatcatggaggagctcgttcgacgcggcgccgcgctgaacgagaagaacaagaacggacacacgccgctggatctggccatgcactggggccacttcgacctcggccagcagctccagcactacggaggcaagcacacgtgcgagaaggagcgcgatatcgccatctcccagcgagatctggcgcaacagcagctcaaagactgcgagctggagtacgaccacgcggtcaagtcgctcaagcaagccaagcaagaacgagagcagctacggatcgagcgggatcgtctcgtggtgctacgcgcgcaggtggtggaagactgcgcggcgttgagcaagcaggtggaggagttccgggttgcagtcgagtcgctcactaaggagcacgatacgctgcacattcaagcttctcaactgcagaacgagctggtgtgcgagcagacagcgaggagcaacgccgcgcagagctggagactggccgaaaaggtgatcgccgagctgcagcaggtgcaggaagagtgtcgggagcgagaggaggaagctcttcgcttacgcaacgaagcgattcaagaccgagacgtggctcgtgagctggcgaaggaggcgcaactggaccaaggcatcgccaagcagaatcaactggaggttgagcgggagcgggatctggcagtcgagcggttgctagcgggggaggcggagatcgcacacgacagggagaagtggcgcaagcgcatcgccaagacggagctggagcgccgcaacattcagatcgagatcgaccgacagacggagctgctgcgctgtgagaacgccaagctggagaagacggtggcgaccctcacggtgggcaacacccgacagcgagcggatctggaacgcaatcagctctcgatcctaacgcttgagaagcagttaacccgacagcagcaggagctgctgacttcaactgagcaacggtcaaagctgagagagcaggtggagggtctgctggaagaacgacgtcaggagaataaagcgtggcgagctcaactggagtccaaactcaagcaggagaacgcggacagcctcaaatctatgctggaagcggctatttcaacgtggaaatcgcttcagagctgccaacagggaatggccacgctcggttcagctgctattgagcaccgtcccgtgtcgccctcacgtacgccagctatcatgtcggctatctttcaacaccaacgcccgcactcaagcacggcgagtctcaccccccctgccaatgccaagtccgggttcctgccgtttctgcaggaaacaccagcaacggggctcaagacttcaacttccactccagtactctccgaaccttcgcatctttcggcgttgaaggccgattcccattccccacaactgacaaatttcgctgatctcgagcaaaccataaacaaccaccgcgagcacgcggaaacggccctgcaggatctcagtatcacaacaacgtccgagcagatcgtgcagctctgtttgttcgtccagacgttcgtgacggacctcgcaacttacatcgcgtcgagtctgcagcgtctcaggttcgtcttgcgtcagtttggctcagttgttcaagctgatctaacgtagatttttacgatggcggtggtgttactgtacaggaagcaaactctagctcaggagaagataatcgagcggaagggcgaactcatccaacggttcaaccaccaccgacaggaagaaacaaagcggcagaaccctgctcgattccgggagtgttcggtgcgcccattgctttgagatcctgggaaaacgtggatgcgaggggatttgctgttcggatgtgactgttgtcgtggcgatgcgatggggtggggacaaacgggaagcgcaccaaattacacggcaagtagggtatagtttgacaatttctttgtctttactaacgcacgcgacggaaggaagctacggcgaatggaggaaagctaacggacacgcttctaacctgtcgaggctgcctcagctccattccaagatcagccccatttcgatatttcgtgtacgcctgatggagccaaagcggagccgcacgtacatgttttcatccaagagcaagacgtcgacgtcgccttgcagcgtggataccgtgctgggggtgaggtcgaagatgattctactgagcggatacgtttgggaggatggcgtgctttgctaccgagttgaagcgctgaaggccttcgggataatgagcgcgaaggaagaagacggaacgcagcttctagctcttcacaagctgtattggctggcaaatcctcggcaagatatgatcatcatcggcgaagtccacgacctacgagtgcagccttgcatcgagcgaccatgttctagcgttgtgagcatgtttggtaaggcgcttgtgagtcggacaggtgcttctgatgcggcagcggtcctgaataaacaagcttttgctcgtgaagtgccggcttgaaaagcattccaaaccgtaaaaaaggctttagggtgaacgttaactttctcgaattacacaaatgctacatatgctactacagtgcttgggggacttagttttatttggtacttcaactcataagtacaataattacattccgttttaagcatgtcggcgaaagcacacagtatcgattcgctttgcccttcttaccggagaccgtccttttgtcaagtagtgattttactttcgtctgaacgcacaagcttccgaatcgttttgtgcacttaagtagctgggacaggaacaaaataacgtaaagcatgctggaaagtaattgcagtacggctggacaggtctacttttgttcgtttgacaacatttgaagtcggttgctctctcgcatagtaacttactacgtgtacgtggacataccgctggctcagcagtgatagcagcgaaaacctatgagagtagcccgaaaggaggcaacagcgaaccctttgttgacctacacgtattctcaattggagtccgccgaccataactatctgaagctggtgcagcagggtaggcctcaccacaaaaatacaccaccaaaatagtatctcgtcctcccgatactgactcagtcactctagtatgagctcgcggtaggtttcctcctacttcatgctttcagcgatctatgaatacgttctcttacttattttgttctcttacccatatatagcaagaggcatcacctcgagagacgccacttgaacatttactcaagtcgacgcgagagcaaataccaacgcgcacatggagtcgattcgaagcctcaggggcttcgtttcgccgaggaggtcgagcgtctacgtagtcaatgggaaatacgtcgacaaaatcaaagctctccgtgacgggacagcccacctcacggcaaaacgtctgctgctgtgtgtatgggtcagcgtcggggtggtaccgttgattctgcaggctcgaagctacgccaagttcatggcgccgcacaagatcacgcaagatctcgtcgcccccgagggttcagtaggcaatacaacgcatctcaacgatctctgctcagtcgaaggcctcgtcattgctggtgcgtggtggaacgtcgtgcccacgcactattactctgttcccgctggaaatctctgccactttgttgtgccgcagtataatatccacggagcgtatctcctcggagccgacaaagtatctccatcttccacgacaccggcgagttgctccaacgacagctacccgttccaccactacttctaccacgggagtatcggcttctacgcgttctacgaggaggcgtcgggaacgtactgctcgatcgactggactgcgtacgtgaaagtgaatggccttggaacgtacgatagcaatggtgcccatttggctgaggataccggggatacgacgtacaggcggtcgtactggtatggcgtgttcggcgcgatttggatcgcgtatcggacgctgctgataaggcgcagcttcgtttcatgcaaacgattcgggcgaaggagcgacatcatgcagcagcaaatgcgcttcaaagacgctctggtgtacgtccaggagagcctccgactatcagcccacggagcgaggagttatcaccgcgctgtgatcctttatctcttggtcgagggtcttatgagcgacttgttcatgctcatcgcgcaggatggcttcgtcgccaagattcagtacatctcactcggatacaacttgtctgggattctctcgatgctgtttgaaatggtggagagcatgaactggctgcgtgagaagtggcgctgcttcgtcaagcgcttgctcttcaactacgagacggccttggtcggagagttttgctgtgcagcagccatgcagttctacctcacgctgttgaaccgatcgagtctcaagcacactcagccagcggcagaagctgtgtcgtactacgtgtggagcttggttggtcacggcgtcatcgtctttggcattgtcgccgccattctatccattcgagcggcaggagccatcgttactgtcaaatacaccttcgggtcactgaagctcttcacgtcgccatgcagtgtggacgctgcactgggagttcgctctaagatgattctcctcggtggatatgtctgggagaacggcacactctgctacaaagtagaaactctgaaatcattcgggatcatgagcatggaggaggaagacgacacgcagttcctcgtcctccacaaactccactggctggcatttccgcggcaggatatgatcgtcatcggggaagtccacggatatcgagtccagccttgcatcgagcgcccctgtgtcggtattgtgagcgtgttcggaaccacgctcggaggtccagcggaggcatcggatgaagccctgataaggccaaagccggtttccactcgccaattgccgtacataagctgaatccatcacttaaccttgtcttgctcacaatacatgaagaaacccatccaaaccacgtattttttggccatggcacaaaacctgagacggaacaacttcaacgctatcagtcagccaccgaaatagcgtaggtttcttgaaacgactgccatcgctctgtcgccttcgcttccttgtactctcggtcaactcaagtcaagcacaatgcctgctcctctgacctccgagatgtcccgacggagtttaagggagcgcggatacccagcgacagggttcttgtcacgattccgggtgttccaggggattccgagccactacccgctgcggactcgagtgcgcatgaagctcaagttttccaagctcgggactgcgtgggagatattccagacggtctttgctctgctggtgtcggccacgtacgtagttcagacatacgagccgcacgatgaaggccagatgcctacattcgacacgacctccatgatcgtcttcgcttccgactatttcctcaacctctactgctgcgagaaccggtggcagttcgtcttcagcgtgaacgggatcatggacgcgctcacgatcttcccggcgctagtggaccagttcggtacaggctacggcaagtccttgcccttcatccgcttcgttcgagtcatgcgcatgctcagactcatccgcgtcgtgcgcgtggctgggtcccaaacagtatccgccgtacagaagcaagtgtacacgatcatcctcctcacgacctgcttgatcttcgtagctgccggtatcttccacgccgtcgaagggaacgaaggagcccagccagatctgacgttcggtgaggctctgtacttcatcgtggtcaccatcgcgacggtcggctacggtgacatcgtgccggtcacgtctggagggcgtgcagtcgctctgggtgttatcatcgtgtcgttcaccatgattcctacggagatctcccgcctcactcacctcatggctctgcaatcgcacttccgaacgacgtatcatccgtcggtggggaagccgcacatcttggtcgttggtcacgtcatggagccccgctgtctgctgaatttcttccgagagttttaccacccagatcgcgccttgggatcgatgaactcgttcgccggcccagcaggaacacagcacgagatcgacccgtccatagtcgagcttccttgtgtgattgttggacccagagagcctacagaggagatcatcaccttgttagatcaccccgtgcttcagaacagagtcacgtacatcaaaggatcagtgatgagtgaagaggacatgtgtcgagtgggcgccgatgcagcgcgggcgtgcttcgtccttgcctccaaagcagcaccaaataccaagcagacggacgccgagacggtcatgcgcttgctcgccattcgaaactataacccggacctgccggtgtacacccagatagttagtcctgtcttcttggactacatcaacggggtggacgcggatcaactgctgtgcttggaccagatcaagatcagtctgctagccaagagctgcctctgtccaggactcgtaactctcatcagcaatttgttccgatccacgactctggtcaaccggcagacgctcacgagctgggagcaggagtacgctgaaggaatggccctggaagtctacgccaccacgctaccgtcggtgttccatggtctcaccttcagccaggcgtgcgaacttctctataaaatctcgtatggagaggtcatcctgctagcagtgtacgagcaaccgagcaacgcgtcatcctcgtcggcattgaagaaatcccctaccagcaccaaagcgataccacaactgcgcagatgctcgtggacacaccaagtggaacaccccgcgcagatgctcagcaaccccggtaattcagttatcatgcgtccaggtcaactggtctacgtgatgagcgagagtaaaaggctcacacttacgagctccatctccaacgagctgaagacctggctagccaaggggaatgtgctgccaacgcgaggggtaaagtacaacgcgatgtccaagcattcgccaccgaaacatggcatctcgaagctgacaagacaacacagcgttgcagattcggcagaactcaggatagtagacgagatgttcatcgaagaggccaagtacccgtccacaggcgacagcatccgaaaccacatcatcgtcgtctcggacctcgacataacctccacggtagcattcgcgcaaatgctgcgtctggagcgccacgtgtcgggtagtagcgattatcacccgatcatctttctgtcgtggtcttcatccaaaagcgcgagcgccacttgtcgagagctccgcgaattcgacgatattttcatcatgctggcaactggagactccaagcgcgagctgcttcgcgcgaatatcctcgacgccagccgctgcgtagttctcgcggacaagtccaacatccaggatgtcgacggtgaagctgttgatagccagacgattttccattacctggctgtcctatcgattcaggcagagaacggtatggacaccacctcgggtctcatgcccatggtcgagctcaacatgcctcgaacgatgcaaatcctcgattcaacgctgaagaagcggacagccacgtcctatcagcaccgccaagagctcgactcccttgtgatggccactgccccgatctgcactgtgggtgttgtgccgtccgcgagtctgtcagagcaacgcatcaccgacgacgccagcgacttcaaacgcaaaattggtaaggcaaacgtcgtcaagaacatctacctgcgtggagccgacaacatcatctctctcgaccagcaagtcaagctgagcaaacggatcaacaccaaacgcacactcatccggcgggagctggagtccacgcgacggcattacttcgacgtgcgcagatcggccctgctgccattcttcgcggcaggctacgggttctcggacgacatcttcgacaacatgctgtgccagagtttcttcacgccggggctgatccgcttgatctacgagctcctgttctccgagaatggccgtcccgcggctctatcaggcgatgacaggaacttctcctcatgcaccgcaagctcgatagtgcagattccagtgccgtccaaattcgtccagagaaccttcggcgagctcttcctgcatctgctctccaccaaggaaatcgtcgctattgggctgtaccgcggcactggaactccgtttcagttgccctatgtggccacaggccccgacagcgacacggttctggctgaagacgacttggttttcgtcctggcacacccggatgccctcaaggctgcaaagcgaccacgacagcaacacgagtcggatccggttgcaggtgcgtcaagccacaaccacgtcaaattccacgaaagggacgatactacgacccaagctgcagcgaaggagtcgtcggagacaccgctgccatcgttgccgcagaacccgaaggggcctgcactcgttcgaggaaacttcaattagcaatgaatcagtgccaacggggctcaactatcaacacggaaacttaatgccccgtcgatccattaaactggggctactaagtacccgctttaggttcaatgcctctttaaaagtgtagcttcgacgcccgacgcgcagcccgcgcgccgacccagcgcacatccgctgctctcggctcccaggacggcgccttgcaggtgctgggcagcttgaagctccggtcattttgaggtgggccacgcaaatgggagtgattgtttttgtgacggaccatttcgagcttttggtcttgaggcgcagcagagtttgaggtgcacgacaacaatgaacaagggcaaggccgtgatcctgggcttcggcgtcacgctggtgggcgtcgcaggtgcgcttgcttcatccctcatggcatggacacactaagcatgcggtatgtatagactaaacaatatctcttgaccaggcgcgctgggcatctacctgccgcggtacagctccatggcgcagcagggcagggagcgcacgtcgaggcgccgcgaggctgtggagaagggcgaggccgaccccgagccggagaaaccgtcgtcctccatgtggaagaacatggacaagaagcggcgcggcgaatagagagagcaagagagacccataaacccacaaatttggtcacgcgcggctgctgttggcgtcgatggagcgcactttggcgatcacgcgcttggggatggcgcccagctcgctgttgggcacgtagcgacccccctgcaggatctggccacgcgccaatggaaggggtgttaatatagtctacgagcagcttggcaagggaatgaagacacttacggtgcccactttgagcacgctgtcgcagtgcgcgagcttgccgacggacgggaggcagagcgtggctgcggcgcacactttcttgccgaaataggacgccgagccgctggggccgaggaagaagaaggacgagcgcaggtccggactggctatcccagccccgcggtacacccagcgcttgaaccagcccggtaaggcctcctcctgtgtcaacgaaatggtgttagcggtgagcttggtgggggctatttaggtggaagaggttgcagcgtacggcttcggcgggctggccgatgttctggatctccttcacgaccgctacgaggtcccacatggtcgtgaagcgcgcggggaggagaatgtcctgcatcacgtggtctccaaagtagcagatgcgctgtattgtgtgggggtcagcgtgtgtgggggtcagcgtgtgtgggggttgatgcaacctgcggcagtgagattgaaacgtacctggtctttctcgacggtcaggtgtgtcgatgtcggtctgcgcgcgttctcgctgaagaaggtcatgagggtcttgacgttgccgtgcgcgtaaatcttgcggcggtgcagcgtcttgaccacttttttcggggtgcggcctcctaccgactcgttatttgctacgccttccacgttcagttcctgcagcaaaccagcacgttagcaatggactcttcaaaatatgcgcagcgtaatcgtggcgtaccgagaagaatgtgtcgttgaactggtcgaagaagacctccttgttggcctccgtcaccacgagatcgaagtagttgagccagttgcgccccactgcgaactgcatcaccgtgttgcaatgcgtccacgacccgttcgtgaggatgtaaagctgcttgccgagattggtcttgaggatctcaagcagcgtcacgatgtcggcattcggctggatcagcagatctggagacgtggtaattgtcttccagaaagccccagcataaaatgatcgagcagccttgagcgcgaagccgcttagtgacacatacactgccttgttcgcgaggaaggggtcgttcgggttgccctgaggctggtcaactatatccgggacgagataaagcgttgctccgagctcctccatgacaatctatcgacaactaaggatcagtactcgagtcctgagaacgaaaactttcagaatcagagcacttaccactcctgaatcgaaggcatccacgatccaggcgtacagaggggcgtagataatgtctgcggctgtgtggagatgtatcagctttgatgaaccgccaagcaacccgctaatgttgtcatctttggtaacggtgtcgccgtacagcatgctgacgctgtagtacgaaatctcatgggaaccatggtaggcgcgctggatagagccgtcctcccctacatgcaagaaattaccacgagctgtatcgacgacaattccgcgctgagcgattgaaggcaaccattccgctggaggaacagtacggagacctgggaagttcttctggagctccttggtagcttgggtgaagctcgttcgcagcagatacgggaggcgatactccacgagcgtatggtccacgtcgaacccgatccacgagtagtgcgagtggtggaagatatcgcgttgatgttggttcagcagaggctcgtagacgtctcgttggcgagctatcgtgaccgctttgagtcgcatgcgcgaggtattctccacgtacaagtccaagaatgcctgcgtgtgcatgctcacgcatttggcccagaaggcttcgagcatgtcgttcgtcagccagtcggtgtgcggctgcttgatgcaagcgacgaactccgtgctcgttttggtctgcagcaatgcctcctttcgccacgctaggtacgcctattccacgcagcaccacactgtcagtgccaatacgaactgttattgcattgctgctaccgtagtttcttaccagcattgctgacacgagcgcgacacagcctcggacaagcacgaggtcgaggaagcgaacacgcagcacgagtggcagcgtgtcggaaatgaagacctggaagagcatccagacgacgtatcggtccacaccgatcgatagcatgtgcttgtagacgctcggatcacgcaactggatgcacgactccaagacatcggtgtagattgcgtacgactcggccccagcagggatacatggacgccggttgggtggaacctggtcgcgataaaggatgaaggacagcactttgccagcctctgcgttcaatcggagctcggaggcaatgaccaggcaaagctgtttgatctgcaaaagatgcagcagcagggtgagttcagcttgaaatactcagttcaagaaccagaagagcgcagcgtacgataattctgttgtatgtgttgacttggatggggagtccagccaccaccgcctctatgatctcgggcattcggctgtcctgggaaaccggtgggaaggacgcatcgtcttcaccggcggtgccttcgccctctggaatcttattggaagctccactgccatgagaagacattgtcatgcgtctcgtggagaattcaaagttctaagcccgtagaattgcgttgtcagaaaagatatgacacgtcctgcctgcactgctagctccttacctggccaataattgacttagactttttgtgcacttcaacgtctacgatctccaaccagatcttgcgccgccgcatagcaaacgaaaggccctgccgaacttggatggatacattgtgcgcgctcatgccgcgccatatgatgagatcatcgctcaagctattgcgcttggacagcataatgcggcctcggagcttccggattcgggcgactgactgtcagatgacagttatttgcaccgagcggttgcactccagcaattcagcggtgtatttccaagcacgaggtttaatcgaggcagcttcggcccttttcgtctacagcgctacgactcgacgagacactaactaagcccgggtttggcgagtttatccatgctcggattttcatttaacgtttacttaatattcttaagatcttgaacgcttatccttaaaatcagcgctactcaagcatttttgttgtctttcgtggcgttaaaggggcatcgagtcgactctccactcgcagtctatcttcctggccatggaggggaatccgtgcagaatcgcgtgcgaaatagcgagtgtgccgcagcagcttgtagcataatacgagatcgcagtcgtacgcgtgcatggcaaacccggtcgttaccatgccaaaaaagtatccaagcacatcgatcaacacatgaccagaacggaacccccaaggacgacaatcacagcagcgctcgagataaacaataatcatcggcagcatccctgccacaatcacactctcagcagtaacatacaccttcgagccgagcctttgtcgaagcgaactggtgaaacaggttaacgtatatgtgcacttgacaatgggtacgggtttgtccgtgctgtcggaattccatttaggtatcttatcaccactccccgagatcgtcatcttcagccatttcgctgatctcatcaccgggcatggccgaccagaagaacccgagcgcttccagctgcaagcggtcgatctcaatgaagtctgcgaatcgcttccttctcacggggtttgtagccaactccccgagcttcaattcgcgcgacgcctccggccacgggtcttcggatggcaccacgaagtcagcggggacgtcggcactcccgaacgcgagcacgtaagtcgtcaacgcaggcatcacgccgtactcccacttggccgcggacacgttccagacaaacccgatctgctccagcttgtcaaagtcccgcgcaacttgtcggaagaagtcgcctcggttgcgaatattctgcgcaatgtagccaagtcgaataccccacgtcgactgcggccatgggtcctcttccggcacgataaagagcgcggcgatgttgcagtctccgtagactcgatggtacgtctcgaacgctggcaggatggtctcctgccacttctggtcattgctgttgaggtagaaacctaacttctccagctccttcctgtcacggtccacgtagtcggagaacgctgagatggctcgaatgcggttcaccacggctccaaggcgaaaccctcgcagaccttccgggcactcgttctcctcatcttcaccttcaccaaccacgaaattctggggaacatcacagtgaccatagagctcttgataccttctgagtgctggcatgaacatgacgtcccaattgtagaccgccaccacccagacgaagccgatgtcgtcgaggtcctgaatctggtacttctccaacttttccttcttctgacgcaaggaattgacttgagagcccaatttgaacccccacgtcgtctttggccactgtggatccccctcaggcaccacaaagttccgcttcaccagtagatcgccctccatcttcttgtaatttttcagtgccgaaagagagatttgttcccactggaagcgcttccagtcgtgaattttgggaaacccgacggcgtccaattgacggcgagtctcctcgagctttggggagggtttacagcttgaaatgtccacgaatttgcggatctcgcgccccaaattcaggccgcgcgcgtcttccggccacacagaagtggctgcgttctggggctcattctgaggcacctggaaggtatagggcaccaaaaaatggtcgttctgctcgtggaagacccgcagagcagccgccagcgacgagaagcgctcggggcggcgtctggagctcaggaagcgatgtgcgccggagaccacctgccgcattgtccatcaattggaaactgccgtagtaatcgagatgtgattcgctaatgtaatgtgaaatttggggaatgagttttagcgaatcagatacgtttgctattgtaatagttgttgccgttgtcagtgataatgagcagcgctggtgatgaggaggtggcggcggcggagcagcagcgcacgctgagcgtcgtgtctacggcggtgtctgtagtggccgcggtgtttctaggcggcggtgggtgtctatctcatcgatttaacctcaatttgtagctgtttctcgtggtattacgaggttgtgacacatatattcatgtttgtattgtgaaaatgtgtcgtaggcttctactacggcatgaccaagcagcagaaggcgctggccgaggaggagaagaacgccgacaagacgtccaccagcaagaaggagttcaagcccaagccggccactctgttcgagaagaaactggctctggacaagcctttgccgcccagcactgcggcctggaaggcgctcttcggtgtgacgctcgtgtcggtcacaggctgctgtttgctggtgggcggtgctgctgctgcactcggagtgaccaatgtgagagttgcagtggttgagtgaggaagttcttaaagaagttgtgctcttatctattgtcatttttgggtgctgtgagcagatgacggagctccgccagcgactgcagaagacgccacgctcgcagaagaacgcggcggatagcgagttgaagcaactggactttgaaggactgggagaggtaaagagggaaattctcgacgttattgcggatgaagtgaaggaggaggagctccatggcaacaagtgaattgttggctaggttcgataaggcatctgtcgaacgaaggtctgtttctctatcagaggagattcgtgtgctgtattggtcgggcctcctagtgttctgtcgaacacactcacgacgccggtacagggccgctcgatgcagggttgcactcggctttcgtgaacttcgccgatgacgatcatgtcctgtcgaggaattgccagccagcgcaatttgtgaataacgagacaactcgctccgtcttcctcctcaatactcactatcccaaaggactttagagtctccactttgtagcggagctcgccatccacccatacatatccactcagtagtatcatcttcgatcggactcccagcgcagagtcaacgctgcatgcggttgtgaagggcttcaatgaaccaaaggtgaatctaaccgcaataagggcccctgtcgctcgaatcgatacaattgtggctacaattccgagaacaatgacaccgtggccagccaagctccacacgtagtacgaagcggcttcttctggctgagtgtgcttgagactcgatctgtttagtagcgtgaggtaagactgcattgctgcagcgcagcaaaactcgcctaccaaggctgtctcgtagttgaagacaagtcgtttgaccaagcagcgccatttctcactcagccacttcatgctctccaccatctcgaacagcatcgagagcaccccggacaagttgtatcccagtgaaatgtactgaatcttggcgatgaatccgtcctgtgcgataagcatgaacaagtcgctcataagaccctcgaccaagagataaaggatcgcagctcggtgatagttcctcgctccgtgggctgaaagtcggaggctctcctggacgtataccacggcgtctttgaaccgcatttgctgctgcatgatgtcgctcctccgtccaaatcgcttgcaggaaatgaagctgcgcctcatcaacattgtgcgatatacaatccagaccgctccgaacaagccgtaccaatacgaccgcctgtacgtcgtgtgcccggtatcctttgccaaatgggcaccattgctgtcgtacgtcccgaggccatgcaccttcacgtaagccgtctggtcgatcgagcagtacgtgcctgacgcttcctcgtagaacgcgtagaagccaatactaccatggtaaaagtagtggtggaacgcgaagctttcgttggagcagcttgccggtgtcgtgggggatggggtcactttttcagtcccaaggagatacgaaccatggatattgtactgcggcacgacaaagtggcatagtttagaatccggaattgtgtagtagtgagtggccgccacgttccaccacgctccggccaccaacaagcctttaaccgggcagaatacgttgagattcgtcgtctcacttggggtgttatcggggacgaccagatcttgggtgatcttgtgcggagtcatgaatttgatgtagcttctggcctggagcagctatgggaccacatccacacgtacagcagcgttctttttgccgtgaagagagacgcttcttcgttggctgcttggaccttgttgatatagctgccgtctttggtatacatgctggacgtcctcctcgccgatattggcatcgagctgttgagacttcttagtgatctcatcgaattagagtacgcggaataccgagttggtggacacgccacccgcactctcgcgaagcgaaggtccgacttctatttatattggtcttggaaggactaccgtagtgataccagtgctgtcgtactttgcgctagcctattatcgccctcagcgtcggtttttcctctaaagctatgaattctttcttcatggattcaacaatttcgcttacttatgcttagtgggttgtttaaggaaaaaatcccgccttcagcaaacttgaggactaggaagaactcacgcttctttacatattgctgtgtgcgaaatacagtatacaagccgaatgacggtcaagcttggatttccatcgccccagcaaagtttaatcaatcgcgtacggacgaccgatgaccttagttcgctcaaatcgaatgaataccaagtattacatgtcacgagaatttgcacgtgaaaaatctatggtaaagtagacgccaaagcaggcatcagggggagcctaaaaatgcatgtacccgagggctcaacatgagtacatgtactgtgtggcgcacccttgcccgagtgacagtgacagtgaagtactcaactcaaaacatgaccaccaaggatcaataatcgttcaagaatctgcctgataaaccctcccattcacgatccacgatgaaccatcctcattctaacaacaactattgtggctttcatccgttttggcaaatcgggtggtccaagatccgatatatcgggcctgatttgctggaggcctaggaggggctgactatatctggcccgatttgcgtctgggggctgcgagttgcgaaacaggggccagaaatgccgcttttcgccggcaaaagggaccaccgcgaaaacatgtctggggccctctcagatcggcgtggcacgaagttttagcggccgtagatgatcacacaggtgatttagctggccatagtgctatgaagtggctgtatacagtgtactattgtccccaatgtcttgcagttctaatgcgtcatgagaggtggggaggtatggccaacttggaatgcctccccttggggtcgccttcgcttcgctcggcagcttaagtacgatatgtggaccaacctaattttgtcggatttgacgtgttatctcggagtccgatttatataaaatggagctcctatatgatcgattagtccaatttagctatatctgacctgagttagtgcataaggctcagctacgatattgcggggccgcaggatccgccccagcctccgaattaccaaccttacattgcgagtagtgcagcgagccgacgaggcgagcggaacgggtgcatagcaactaacaacaatttaataaattctatccgccgcgtagcggcggcgctcggcgagtggagtgatttcgcacggataaaaagtgtttgagcaccccaaaaaaggaagtattacgtattttgtgtgcgagaccgcccacaacataaataggaagtcaccccggataaaaaagaggataccactgaaatgtatgaatggatacagaacaaaaacatttttcactcaagctaagaggagatcaaacagtaaagcgatccgcaggcgaccaaagagagggagctagagatggaggagatgtcgtcgggttctgatagcgctgatgaaatcgaagcccctggcagaccaaggtggaccaaaattggaagagctactacggacgaggcccagtaggagttctgcgattcgctcccagcacacagtgttgaagaagcgaccccactaattgtacaatcgatcctttagtagaccgaaactacgcacttgcggtttctgagcacaatatgagagtacagacagctaagtgtcggtcacgacgctgccgatctcaagatgacgatggctctgattcggaagaagtccgcatcccctgtccttgtagatacaagttcaagatgtgtctttcggcccccgtttgcgagattccagcaacatcgccatgttggaggcactgatggatcttccagttcccctgtgaagaagttgacaactgaaatgaagaatttcattgtggaacaacttagttctggagtaaagacaacggcgtctcggctttttgctgtgatagttactatggtttctgagggagatatgattggccctgcaccaaaggatcagcaagtggttgactttgtgaaaactggagacgaaaacaccccaagaatcctatggctcccatgatagagatttgcgatggtcatctctacgacatgctgtatcttacatcgcttcaaaatcttgagatgatgattttgtgtgactcgcagcccgatgaacgccctggtagccgtggtgccgtctcacttattggtgacggctccgaggcttttccaattcgcgtcggcatgacttgtctgcagcaaatccgatattatttgtcaattttaactcgcagcgattgcaccaccatgctacacatcgacagtactcatagtatggtgattcacggctactccattttttgcgtttggatattcggaccaaagctgccactttttgccactagcgttcttctgtacgtcacagaaacgcaaatttgacattggctggagcatccgctacatcaagcgtgtatgcttagatgcttgtggtattgagtttgagcctcaatttgtaatgatggatgccggtaaggcccagttcaacgcctgcgtcacggagctcccacatactgtggttttgatgtgctggttccatggtacgaaaaacgtgtaaaaatatgctgctaaataccgagtatcttacgaagacaccaggtctgtctttgaggatttgtatgatatgcactatgctccacaggaccagttcgaagtcatcaaggatcgcgtgttggtcaagtggaagggctcgctcaagggtctaccatacggaaattgacaacgcatatcattcgagagttgaattcagtagatttgcaaagtggcaggcattccgcgctccgcggggatacgctgcaactaacaatccccttgagcaatatcaccggcggttgaaattagagtgtccagaaggccctctgtcccctgatgacttgattagaagtttgaacagcgcaaggctggcctttttgagtcgcgagatttcattttgcaacttttcgagtgcatcggagcggttgatgcttttgtatcgccttttagccaagcgaggctgcctagaggtcgagcgtttaccgactatttcgactgttcctgcagatctgtatcgagttttacaacgtccgcttgtactcacggcgacggagagacggtccgtaaaacagtctatcaagtctgcgaacgcaagacgcaagcaaactgaaaatatgcccgtggaaggatgggttgctgacacgcggaccaaggcttgtccctgcttgtactttgaaaaaaatggtgcatgtagtcatcttgttgcagcctgcattcgcggtggtatccacatgcccggagtgagctccaactgcagacagtttgtgcatcctagacaccaggtaagccgacgcacagtagagaccggggtagagggagaaaagactgaaaaccaagtcggcgtggaccaaggtatccctcttctggactcagaggcagaaactttagttctctcggattcggaggtttctacagaggatgaggaatcagtcgctgaccgtaccaagctcgtgataaagagccgcgatctgtgcttccagatgtgacgcagcccctgcgcttggatagtaccagtgatccggctatcccggccacgcaacgccatgcagatgtgaacctcaatatcagccgtgatactgttcatgatcggccagtctcgtcaccagaggcaacgacccaacacgaccacgagcctgacagcggcggtaggctgtcaagagcgctcgttgggaccacttacacaatacttaaggcgatcaagtcgacgacgaaaacaaaccaagcgagcagtagaatcgcggcttcaaaatggatcctgaaagtaaggtgattgcaccatcattcaggttacaccattggactaccctttgggtcgcgaagctttgaatacatacgtacttctacttcttatcacatcatatgtccgcctacctgcataataactcgaccaacttgccgaataactcgacccatttgcagaataagtcgacctacttgccgaataagtcgaccgacttgcgctataagtcgaccttcttgcagaataagttgaaccacttgcagtaaaggtcgaccgagttgcgctataagtcgacctacttgcagaataagtcgacaggccattatgatcagcagtttgtgtgcgaaaatagacgttacatttgtaattttagccattagcgaagaccaacagttccgtttgtctctcccccctctgatctcgtcccctcagcagctcaagtccctactgcctggaaatggagaaagagaagcggcgcctcaagcaagtgcctatcgccacgaaggttgctaagctgaaggagtggcgggttggagcgccagggtagccgcaaagaatctgaaggtgactctattggggtggaagaaggcgctttggagcatactcgacgatgcagctgcgttggaggctttcggtgacgcgtttcgggccgaaggggctgggaaaagaagccagagaaatcttacgagcccagcgtctgtggattttacgagacgtgtcttgtctttggaggaacatgcacgttcacggagctgctcacttatgcacggaataatattccagagtttgcgatactaaaggagggcactcaagagtcgtggatatcgcgttttatatgagtcaggcgactgggttgccaaataaagagggtacaagtagcagtgacgcggaaggtaaaactcacagcgaggtggccggggatcttagcgctcgtcctaaaagcgatccctccaacatcaaaaacaacattgaatcaagaacaactgaagtcggtgaggagccaggccaggctaccacaactgagcccgtaaatactggtatatgtcactcaaataattttcccgctgaagaagagcctgagttaagtgaaaaacctgcagctcatggtgtccccaacgtgaatcaaagggacgacaacccccaccccaaaacacctaaaaacaacaggcgtgtggctcgtcccagacgatcaactaaacgaaaaagtcgtgatgaacccttgctgactgtgatacatcaactcgctggcagcatgcaaaacgaaactgtgaggatcccgctttaccaaaaggatttcgacagtttattgcctgatgaatggcttacggatcgagccatagattgtctgattttcaagcacatgatcagtgttgacacttgggtgtgcccgctgggaactacgttcttccagggaatcgcaaacgcgtttcgacttcaagaaaatggcgaagaaattccagatgaagtcacaggcatttttaattggggactctaccggtatttgttgcttcctattacagggtcggaccacatcagttttgccattattgagaatccgatgagcccggcggatactgtttgctaccacgtcaactcaatgcgcgggtgccacgattcggaggcaatttttgctgcgttgaagtggtttttatacccgggagcagataaactaaacggacacagcagcagggcggatgcaaaatcatttgcatacaagacgagccctcgccaagctcatttgtctgactgcggagtgtataggctacactatatgcacaaggtagcacactatatctctgaaaaaaagccggcatcgattgcagacgagatggagtcactgaccagcagcagcttcaacgtagccaaggccagccacttccgatcggctctactccaggcgcttgaaaaggataagatcgaggtgacagtaattgaataaatgcgatttcttgattgaactgcttcgacttcacgtaattatgctagctttacatgcagtacctacattaaaacatgaattatcatgctaagttcttagcgcaagaagtggtcgatttattcggcagtaagtggtcgatttattgggcaagaagtggtcgagttatttggcaggaagtggccgacttatttggcaagaagtggtcgagttatttggcagtaagtggtcgagtcattgggcaagaagtgatcgagttattgggcagtaagtggtcgagttatatggcaggaagtggtcgacttatttggcaagaagttgctgattcattcggcgcgccgacacatttcgtacaaagataaatgtcagcgtggcacaataacacctactgcaccatgcgataatatcttcagtgcatatcttgcgtccaccttcaactacgcttagtaactatttaagtacaggaaccctactgacgggtgtctctcccaggattgttggcgtcactgtatgtatatatgcgtgggtagtccatttcatattttagggtggcaaaccttattggcttggtggccttcacacaaacctcagtggtgagatccgactgttcagtggtaaaacacccccctcgcgctcggctagtctacaacaactaacagagagatctgtccgtgtgaaagtctgtgtgaaccttttgtccactttaaatgttgtccacataatagtacttaggctgccgagcgaagcgacggcggccccgtcgccgaaggcgaccccctaatacgatattgcggggccgtaggacccgccccggcctcggtgttactaacctaacatagcaagtagtgcagcgagccgacgaggcgagcggaacgggggcgcgtacacgcccaatagtttaaggtatacttaccgccgcgaagcggcggcgctaggctagtattatcaaagcgcgcaaccctgtttaccatcatggtatacaggattttgcgatggggctggcatgcacgaccagccgggatatttctccagctctcatgtcttccactgctaatccgacatcgagatgcgtatctctcaaggtttagtgctgctcgcggtttccttccttgttacgtgcgaggctctctcctccgccccggactccaacgaggccaagatctccaaagtggcttcgctcgtagttcccagtcagcgactcctgaagacccaccgccagcctgtcgacgatgaagaggactcgtcggaggaagaaagagtcctcacgatcgagcaaatcaaggcgatatgtaagtaggtgggtattgatgccgaaaaagccccgaaaaacactgcgtacctgcagagccatgccaactacgaggcctacagagagaaggccaaccaaattcttaacaagcagaaaggcaagaggcctccgagtatcacgtatcatgaggactactaggctccttaagcctagcttggtgagtatcgattcctgaacaagcaacttgttgaaatgtacggatagcgcgagctctagctatttgcaagcgataatagaacggctatcatcactagcacttccgtctaacccatcatgcgtgtgaagagccggtggtacgacatacgcactcttcagctcaaaaacgtcgggtatgggcaacaccgctagtttttattttttttattcgacaagtccccggtcgtattagctgtacagcttgaggacttcggtatagtcgtttagcggtaaaaccgctcgccgtaaaggctccgcgtttcagattcgcaagtagcaaaggctatgaggtaacaacgcgcacgaacacattgtgtttattgttcgtcgatttcgcgttgctgttgcttccgactaggactggtacgaggtgctggcgaacacaacgtcgcgcgaaggccacctctatcttgcaatacagtttcgggttgccgatgacacgagcagcgtcgggtacctcacgataatgcagccttcttggacgtccgtaagcttgcgcagcagctttaaaggcgagtgcagacagctcagcaacgatctcctcacgcttcggactcgccaataggctcttgaaaaccaccgcagtcaacacgagttcttcgctattagtgtgaatagtgttgacctcgcacgtcaagtgcccgacgcaatcgagtagcgagtgccaactttcgtataggcgatttttttgccggagaacgatggatgaacaaagagagataaagatgtgtatccactacagagagcggcggatataatataaacaacaattgttcgtgttgaggattgatgtgtattgatcccaacgttggagtgcgatcgtgggtcgtttatcctgtgaagacacagagtgctggaggttttcccacgtggggctgtcctatgaaagaggttgaccaccacatccggcagttaggaaagaaggactacagagagcaagaaagaactaacggagctttgagctcattccacaaaacaccgactgcctcacaggtagcctttgctgcctgctcgtcactactcgttcctttagcttcctactctgcaagcaacacaaggtcgcttctggttatgagcccaaccccaacgcggggaagttcagtgttcacctttcgagcacggatagttgagccagaagaccccgaggcgtcaacgagaagatacctgctggagcagcagctttctgtaacccagttgctgcgtgcggacggtgaaattgaatctcttgtgacgtcttcgacaccgcgagaacgtcgacgtcgtttcccctgctggtcgcaagtgaaggagaacgtgattgtggtgtagtaccccgcggaagaagtaggcgcgccgggcgccggaggaagaaggcgccgggacgcgagtgatggacttcgacgcggctgatggaacgcgacgcggattgatgggcgcgacgcagggccgagctcgacgggaaagtcggcgtgggtgatgggccgtgagacacggtgccagaatccagtgcgacgcgtaatcatccgacgggtcgaccagcgcacccggttctgcaaaacgcaccgaccctaacccccgccgagcaaaacgcgccaagcaagacgcgccgagcaagacgcgccgaccctaacccccgccgaccaaaacgagccgaggtaagatcttgattgcgccacgcaaaccaggttgaaggacggcagtgcaagcacgacagaagtagggataggcccagagcggtaggcttagcaagcagtagtacagagtagccagtagcaaggacataggatagggtaaggactcagtcccgaaatttctctgaaccacaaagacctcccgtcttccgaggttccaggggaaccaccaagcgccggcaagtagagccgcctcgatatcgcggccccacgtcgtttgctggttcgggtgctcaccccccacagacccgtgctggaacaaaggcacgttaaacgtataccgtttaggtgggcgcccgataacgcgctgcctaggcgaaggaccgcactggcctgataaccgccgtgcacaagaccccccgtgtaggcccgataacgccacacaagccccaggaaacgccggcccgataacgccgcacgcccgacgagaacgccgaggaaacgccggcccgataacgccgcacgcccaaggctcgacgccctacgacaaggaacaagcgtcaacacaagaacccccaactccgaagcctgcgaagacttgggcctgtatttcgaagatacgctactccaacaaccgggaataatttgctcggcgcgaccgctatccagacgcgccgagtttgtgcgagatcgcattcgcgagatttctgcgagggcgctactccacaatggtgccgcgacccgggagtactacttcgaatgacgggctaacgatccaagaggcatcggaggcaggtgcacattcggctggaaggtcgccgaccgcaagagagcacagtgagagacctgtctcgtcgtggagctctgagggaaccttcacgacaggccacgggtccagcgacgaccaggagggctacgaagaacagtttgccgttcccgatgcggctcccgacgagggagccgcgaagggccgcgacgcaagtcgcggtcctaccggtcggaagcctgcaaaggccgacgaccaacaacaacccaccgccaaggcagccacgaagcgcaagccgcccaagaggaagaaaaagaagctgcgcgcgccggactcggcggaggagtcgctgtccaagccgcaaggcaaggacacgggacgtcagtacaccgtcgaggaggtacggtacgtcgtggcgcgcacggagctcttccgtctgctagaagaagacccaatcttggtcttcctcaagcccatgctgatgagcaacttcacaggccccttcgtggcgccggacttcgatagtctcaccagcgttgcccacgccgcgccgactctcttccagatgctgcgtgactcggggttcgtgctgggggctttcgagatggagaggctgtgcgattgggacctcaaatcttggttacgtgcggttcgcgtcgtgcaggagcccttgacgattctcgccggatccgtcaaacaagacgcgacgagttccgcgacgggccaagacgcgccgcgcccctcggcgggtccagcccagacttcgacgaccacgccctcgcctccacctcgataccaatcgagcgtggactccgacagcagtttcgagtcgcccaagcgcatgcccatgaaccggccgccgagcgtcatgcagctatccgcggcgaccacacgcacagaggtgacgaaacccgccgaggaggtgcttcccaaggccttgagagaatctatcatcaagctgatgcagacgacagtgatgaacaccccgcgcgccgacacagccgcaattccgacggggccgaagccgcccgcgaatcccacacccacggtggctcgcccccaggaggcagcggatgttgccacggagtcggtcagttcgcgttcttcgacaatgtccagaactcgacgcgacgcggacgaggaccccgatgacctgttcgacttggacatcggagtgccaagaaccacggccgccgtctcgacggcgacagccggcggcgtagcccccgcccgcgtacgcctctcagcatcttccgagctgaaagagttctcgggacgggacgccagcgaagagaaagccagactgtggctcaaccgtctgaagtccgccgcgccgcgcgacgggatgacgggcgaagaagtgtgcgggcagttcagcgatctaatgagcggtcctgcgcgccaatggtatctccagttgcccaagaaggtcaagaaatcatggaccgagctgatggagcaattccgggtgcagtactgcggcaagggcgtgtcaatggccagtcgctactaccatgcggctcagcgccccgacgagacccctctggattacttgtaccggctcaacgtcgcgggcttgagggccaacatcccatacgccgagggcacgactgaagagaagcgcgaacacgtcgagcatttcatccggacgctgaacacgcaggaggccgaactcgcctcgcgtctcgcgctgatggaggtcgccgactccgaggcgctggagaagaagctgtgtggccgacaacgtggattggctcaccagaaaaagactctcttcggctcgaacaagttccgccaaaaggcgccgaccccgctgactcagccggcgcgcgccgtgcatgcgattcacgtcgcgtcggacgagtacgactcggaacgcgaaagtcgcgacagcgacgatcgccagtgcgaccaagacgaggcggacgaagaacgcgcccagttgttcgtcgcgggacaggccccgccgggagagccggcgcgtcgcaacttcgatcccgacgactcgggacgcgaccgcccgcggtgccgccactgtggttcacgtcgccatgtcgaaggagactgctggaagttgttgacgtgtcagaagtgtggtggccagaacccgacggagcgatgcttgagggtgtgcaaggcctgcggtgacgtgcacgaagccggagaatgctcgatggaggagttcttcaaccaattgcgccagtggtttgacccgaataaacacgcgggaatgctgccgccggccgccgagaagatgttaaactaggacgcttgctggcttggaaaccagtacgagacgagcgacctgtttccgtctatgcatatgtgaccaagaagtcgcgagaggtggttagtgagagcacgacttcccggaatgataatacatgtgaatccaacccggaacgtaccacgcaagaacgcgcgccgcgaatctcggcggtccgacgtacgacggacgacgagttcgcacgtgaaccacccctggacgagatcgacttgcaaccaggagagcgacgcggatactggaaacattacgcgccgcacaagttgtacaagcaggccaagattcatggaaagctgagcaaccgccgtgctgtgttattgctcgacacaggtgccgaggtgtccatcctggacaccacctttgctcgtgaggtaggctgcctgattgacacggagatcacgcaagagtgtgtgggaattcgtgatgagacatattacacggtggggagaaccagagtcaagattaccttggctgggaacttggtgtactacatgcacctgtgggtcggcgacttggtcggccaacacgcaatcctgggaatgaacttcatggtgcccgctggagtgcgccgcgtcgggatatgcgacggacctcacggtcaacgaggcggaataccgcgggctgctgctcggatgctctcttctagaggagctcgacgacgtcacccgactcgtcgtatgcggagactccaaccttggcatcaggcagatgcgggacgagatggactgcaagtccccggggttgaagctgcggcgacaaaagacgcgaaacgcactccaggcgtggccgcaccacgaactcttccacgtacgacgagactggaacgcgagtgccgacatgctggctggacaagctctgcagcgtcaaggaggccgcaacgcgcacagccccgaggagattcaagatatgaagatgctgaatcgcttggaagaagtcatccgatcacgggcatcgagtcccgagatggcgtctccagccaatcccgacgcggataatctcgacgcggataatctcgacgcggaaaacctcgactcggaaaatctcgacgcgaaaaatcgcggcgcgaaaacgcacggcgcagatgaacccgccggaaaggcatggacacgggacgcgggacagcacaagtcctcgcggtgacgacgcgctcggctgccgcacgcacgacaacacgtatggtccgacctccagaagtcctggaggagctggtggtgcaacgactgcgcctggaccgcatccgcgtcgcccaggacgaagaagtctggatcgccaacctcaagaagtatctccgcggcgacgccggagacctatctcggcgcgaggtgaagaactaccaaaagcttgcgcctcagtacgaagagggcgaaggcggactgctctactaccagccgagaagcgacgattccgccgaggatcgcgatgtgatgatgaagctggtgattccagagactcttcgggaagatgtactccaccactatcacgcgtgcctggaaggcggacactcgggtattggccgcacgtaccaacgcgtgaggcgccacttccattggccagggatcttcagaagcgtccagcgctacgtcggcgaatgcaccgactgcgagacgggaaagggtcggccgaccatccagggcgagtcgccgggcaacatcgtcgcgacgtacccgttccaggtcattgccatgtaccatactccgtcgttgccggcatcctacaaaggcaacacagagctgttagtctgggtcaacctcttcacggggttcgtcgtggtcaaagcgaatgcgtcacgaaccgcgcagacggtggccgaggcgtacgaggaggcggtgttcaggcgcttcggcgcgagcgaggctatccgccacgaccgcgagccgggcttcatgtccgacttcttcaaggcgttcagcaaactcatgggtcagagccagcgagcgacgctcgcttatcgtccccaagccaacggtgctgcagtacggatggtgcagacggttacaagagcgatcaagatgtacatcgcggacgtcgatcaacgcgactgggacgaatacgccgcgcgtcttaccttcgcgctaaacacgtcgcacgaccggacgaggaacgaaaactcgttcttcttagtgcacggctgggatcctcggtcgacgctggaagcgacgctggccgtcgggaacacgtcgacccgggacgccgaggcgaggcggtggaggctccgtgtccagcgacactacaaggtggcaaggacacaagtgttggagttagtccgagaggccgtcgaagagagagctcgtcgaaaaaccgaaaacgcgacgcaacatgagatcgcgacgggctcgcaagtttggctgtacctggatcgggtgaagccgggttatgcgcgcaaactcgcgcacatgtggcacggacccttccgtgtcgccgagctggtcagcgcgttcgcagtgcgcctcgagacggcgggcacgccctatcagctgtaccccgtcgtccacatctccaagctgaagcccgtccaggaatacccgtcgcgacccgcgacgggaatgggccaagactcaaaccttctggacaaacttacctgcaagacgcggcacatggaaggcggggtgatcgcgcgtgactcggcggcgtacgttggcgtccatctcggccacagtgagcggcgtccgatagaaccggcgccagggctcctgcgcgtcgatgtcgtcgagcgcggcttgcaacgtcgcgtgctggaggcctggataccaccgtccgatcgacgtgttcgcgtgcggaacgtgaagcatcattgggtccagcaagaggtccatgtctgcgagcccttgctagaacagcccgaccaccagctgccacaggctgttgaggtggttgcccgcgtgtgagcgacgcgagttgcgcgccgtgcgccaccttttccacgccccgccctgcatgggtggcctcccagtacgcctgagcccagtgctcgatgtggtgccggagccgacgtaggaatgggcggaacgccgcgtcgccggacgcgaagagaagcgcctcagcggcttgagggaggtacccccttggccgattcgcgtatagcgtgtcgacgttggccagagtcacgaggacgcggttccagttcgcaggcgcgtggggaacacggcgcggaatgatccagccgggcggcggcaggaagagcgttcgcaactcctgcacggtgatgagatgaaggcggagacgtcgtacccgcttgggccaaggagcgtagcgaggctgccgccagccagacggagttccggcaggcggaatcacagcgtcgaagaagggcgccgccggagcactccccgtcgagccgctggaggcggtgctcgaggacgaggcgcgggacgacgaggatgcggacgagtcgtcgccactggagtcgcccgaatcgcccggaccagggcctggtccagctccggctgccgcacggcccctcggcgaggagtgcgtcggccgtgcaggagaagagtgacgcgaggccgccgagtgcgccgaccccgccgcgtgcgccgaacgcgttgagccggccgaacgcgtcgacgccaaggagggcgagcgagaacgcgagcgcgagcgtggaggcgagtgcgaacgcgaacgagaggcctagcgtgaacgcgaacgcgaagcagaacgggagcgcgggggtgtccgggaacgtgacggcgaacgtggaagcggacgcgccggcgaccgtgacggcgaacgaggaggtggacgcgccggcgaccgtgagcgagacccggggctatgcagccggtggcgcttggactgagctcgccgcgcttggtcctcgctgtccgaagactcggagccgaagagcaacgcgtcctctcgtgcgcgcgctgcagctgcagcggccgcagagggcgtagctgcagatgaggcctgcgcagcggcgttgtcggaagccgcagtgtcggccacggtagagggccgccgactacgtacgaaccgtcctactacacggactacgtgaaagaagaacccgaagaagtgcagcagcagaggaccccgagtggcttcatcccgatgtacacgggaacggagaagcatctgtctgttggtcctgtatttggctggagcgtcggtgcccaacaaggaggctacggtggctggggaacggtgccgaagcccacggtgaagatgggacggaaggtgaaagtggagcctacagtgaagtctcaacctatgagaccggtgaagacccaaccgaggggaccggtgaagacagtcgtgcacaacaaagcacctgtcagaactgcggtgagtgcctcaacgaacggacggccgatgcctacccaagctcggaacggtggctaccgtgcccctatgaacaacctgaccgttcggaacgaccgcgacttgtcgtctatggtctccaatgcgatcaaggtcctacctgctttctactcggacacggccagcatggacaaggcgcgtggcttctgggagctgctcgaagcttacaccagccaccttccggatcagtctcggctgttagtgttccgacaacagatcaagggctctgaagctgaacggtggtggaacaactcgactatcaagacgtttgcgtccgattccacaacctgttcctcatgaccagctctaggaacggttgcagtccgctcaccgtgagcgtggcgaatccgttgaggagtggggtgaccgtgtgacggatctttctgactcattggactatccgaacaggaagatgtgatatcagctgttccgtcgcggactccgaaacaagcgcatattggtatgtctcgactcgggaccggcgcgtgacattccggaggcctgcgaatggctattggccaaggagatgtcgcgtcccattgaagaagacgacaagttctcggacgagaagaagaagtcgagcgggagcgatgcctcgcccgcgaacgatccgatggcggctgtgggcgtgcttgcggagaagatgacgacgttcatgacgcagcagcagcagtggcagcagcagatgatgcagaaccgctggcagcctccgcgctcgccgcggaaccgcatgcccaacgtttcggctacgacttcgaatcctggcgttggaatgaacggtcaaggtcctcgtgggaacagtcgaccggtccgaggaatccgtatgggagctgacagtcggacgcaagagggagcgcctgtgtgtagccggtgtggctacgtgggtcactcgcgagagacccgccgccgccagtccatgacgtgccacaactgtggcgctcacggtcatatcgctgtggagtgtgaagcgggacccaacaactaccaatgcggcccgggaacggtcggccggaacggcggtcatagcgttaccaagtgcgcgttctgcgaggaagaaggtcaccttatcggtgcgtgtcctggcattgtggcactccgtggggcggcccaggatctgaggaccaggtccgcacaaaccgcttcgaaccaatgacgggggcgggaggaaggggaggagagagtcactccttcctcttgtctagtaaatggctcgagtggtggtgatcgcgaccgtgaagctgaccaccgttgatgtttttgtggatgcagcgaggaagcagaccgaaccggtgtttgccatgcgtggagcttcatctgctgaaaagaaaaacaagaaaaagaaagtcgggttcaagatcgttgggacggatgaagaaggagaaggattggttgcggacgtcgaaggcaaggaagccgaagtggcctacgaagatctggtcgctgcgtgccctgaacggtgtgatgaggttgggaacggtggggagacaacggtcacggtgatgtctgaggattgtaccgtgtcggaacttcctacagtgacgcgcgatgaacgaagtacggtggtcgaagtgacgtcgccggaggaagtggtggtgcccctggaagtatgggaggatgaagggtacgacgcgtcggactgcctgttcgcagcatggacgcaggaagggaccgtacttgctgaggacgagaaggtgaacggtacggtcgaggccaaggcggttgagactgacacggtcgagaccaaggaagcctcggagtacgactgtttgtttacggacgaagaactggatcctatggatgactgtgagccagggcagaagacgtctggtctcgctggaactaatgtcagaagagtacgacaaggagctggaggaccggttgtatccgctggacgaggtcgagttgctgaagcgtgtcaagccgaacgctgaagctgagaccgaaccgtctgcggaagagctagctcgcttcttgggtatctcttcggaggtcttggggtggacgcgccaagccgcctccgactcctttggaacgcctgagtactggcaagattggtacggtgatatgctggagaagtcggaggaagccaagcgtgcgaaccgagacttccggactccggtggcgaatgtcgtctatggtgaacaagctgcgttaagtggaacggtggggaaggcctcggagcggtcaggcgtcggcaacgatacccgccgctctgatgtctcctccgaacggtcggattctgaagatgaaacggtcacaagcgtggttaacacggtcggcgagtctttcgtgtgcgagaatggcttgcgccctgccgatgatccgggatgaacggtctcggtggaagaagggatttctgtccaagttgagtacaacgcgtcgatccgaagatcaagagagcgatcgcgcgccaggcagtgttccgcacgttgaatgagacgaggggctatgaaggccgaaaccacggtcctgaagaagtgctgaagggtgaaggaggaacggtggaggttcctccgttgcgtgacaaggtgcctgatcccgattgggaacggctacgtgagcacgtcaaccgtgatgtggagcagtatggtccgaagggagattgctgggaacggttgaaaccgtgtatcaagtcgtatttcgaggagaacgcgggtcaagtgtggacgaatctgtggggccgtacggggcggtcgaggatgccaagtgctaggcgccgccgtcgccgtcagcctgagaagaagggttgctttgtcttttcgtcgttgaacaacccgtatgccgaagtactgggaaacgtggagttctaccctgagcgtgaagaggacatttctcattacgttgagggggtacgatgcgagcgtcctgctcggacaccgttaccaaggaccggtctcgtggaagttgtcacagtcaacttgcctaacggatttggactctgtgatgaagatggagatgagtgtgtcgtgtatcgcgccgttgaggacggacgccgggtggtgtgtgctgttggcaactttgaggctctctcgagcggttatattgactgcttaccgtctcaaatgctagcggatacaggcgctactctaagtctcgaggatcgacgcgtgctgaagcgtttaggacggtcgtccgagccgctggaaccatacgaaggcctagtgaggagcttttcaaggcacaagttgcggatccgtggttggattaccctctctctccggctgggaacggtcgaagtgtctatgagcttgttggtcgcagaccgcctccacgtcgatgcgatcctgggtgttgatgccctaggagcgttcggcgctgtgatagacgtttcggaacggacgttgactctgaagagtgttgaagctggatttcaccatggtgcaggagtcgtacatgacgacgatggcgacgtcggagcggttaccgccgcgtggccaagcaatcgtgatgactcgggtcgttagtgctgtcgtcgacaaggcgaccgttctggtcgaagggtcgttaggtctgcctccgacgctgtgtgtggcacggtcgctgtgcacggtcgaggaagccaggtcatcgtcgaagtttgcaatgcgtctacggatgagtactggatccggaaatgaacggtcattgcgtgcacttccgcgatcccggagtcggctttcgagccgccaacggtcgatccgcagggtgcggagcgtcaaacggttggtccgaagggagcggtacccgccgaaggtgatgagctcaaggaggagcgtgtagcgtctgtgtctgaggcgcgcgaagtgggcgtcggtgagaaggtgaacgctacgaagccggacatcccgcccgacaaagcggaagctatgaaggccgatttatcggagtctaaactgtcgccggaccagaaggaactgttccaagaagaactgaacggtttccgcagcatgtttgtggactcttctaagaagcccggacggacggatctgttgcaattcgagaccgacaccggtgacagtgctccgatcaagcagcagccgtaccgtgtctcgttggctgaaagtgaagtcatggaagcggagatccagcagtacttggagctgaacctaattcgactctcgaacagacagtgggcgagcccggtcctgatgattcggaaaccgggcggtggaatacggttctgcatcgactaccgtaagttgaacgcggtaacggtgaaggactgttaccccatgccgttgattgatgatattctggacgtgttgggcgacgctcaactgttttcgacgattgatatcgcttctggctactggaacgtgccgatgcacccggacagcgtgtctaagaccgctttcacgtgcaaatacggtctgtacgaatggttagtgatgccgttttgcctttgcaacgctgtcccagcgtttgaacggttgatggagaccgttttggtggacctcaagtggcgaatctgtttggtttatctcgatgactgtgtcattttcagcaaggacttcccttcccatctggtccgtgtgcgccaagtgctgactcggttccagcaggctggattcaagctcaagatgaagaagtgtcactgggggagcggtcaagtagcgttcctggggcacatcgtgactcctactgggatcctgcctaatcccgagaaggtgaagggcgtgatgaacgtgaagcgtccagtggacgtgcatgggatccactctttcctgggtctgacgagttacttccgtcgctacatcccggggtatgcgtctatctctgcgcccctggaacggctgaaggtgaaggacgcaccgttcgtgtggaacgaggactgtgaagctgcgtttagacagttgaagcgtgcgctcttgaagccgccgatactagtctgtcctgacggcaagaaacggtttaagttgtacgtggactcgtcacggtacgctgttggcgcttgcttgatgcaagaggcgaacggtcgcgaccgtgtagtggcctacgctagtaagctgttggctgggtcgcagaagaactggatcaacaaccaagatgacatctcggaaattgaatgttggggagttgtttgggcaacgaggaagttccgctgctacctggacaaacgtgagttcgatttgtacaaggaccaccaggcgctgacgtgggtgttcagccccggtaaccgtacgacgaactctaagcttgcacggtgggcgatggagctctcgagcctccagttcaaagtgcatcataagcatggtgcttctttgggtcatgttgacggactgtcacggttgccgatggacacggtactctgacgatgagcgacctcctgaatcctgaaagtacggtcgatgacgcgtttccggcttcagtcggagagcagcctggtacaaacggtgaacttgtgaacggagatgatgttgctggtgaacgtgcggacggacatatggatgatgacaaacctgaccttccgaacgaggacgttgacagcggtccggaaacggacgcgccgatatttcctgtggaccggtttggcctcgactatgaacagttcgtggaagcacagcaagaggtgccgtggatcaaggctctggtggctttcctgctggacggtgccttgcctctcgaccccttcctgcgagcgactggtgtcaagatgggaagtcgatatgaagtacggaacggtttattgatgcggcgtgtgaatcttccagctcgagtcggacctgcacggtccttgaccgttccggtggttccgttaccgtatatggagaccgtgttgcactactgtcactctgacgttctgtcatctcacttggaatgacgaagactctggaaaaggtgaggaggcatgcgttctggccgggatggcggaaggatgtcacggagtacgtccgggagtgctaccgttgtggtagtgggaagggctcgagaccgtggcaagcggggcagatgcaacagatgcccgtagccgatctcccgggaccgttctcgctactagtggccgatgccgtcgaaccggtgtccacaacttcctgatttcgcctgggtgcagatccagaaccacgttggaccttggatcttgcatcctggatccacctgagtccagatccagatccatctcagtctggattcagtgcgatccagatccacgttggatcttggatcctggatccacccgagtctagatccagatccatccgaggcttggatctgggtagggtagatccagatccacccgttggatctgcgtccttttactgtcactcttccggatttgtgccgaggtccagattcgtcacttgtctcacccactgccataacgcttttctgggaattgcgcttctccacaatcgcctcctgaccgtagttgccgccgaccaacgcactccgggtacagttagccacttctccatcttcccagggctgccgacatgtcggataccaggagtagtgcgtcccatgcgtcgtcggcccgcagcagccgccgcgcggatccgtctgcgccggatccacccgatcccgatcctcgtaacgggcgcgaggaagaactacgcgctctcgtcgctgcgcgcgacgccgccattcgtgaccaagaagaggtcgccgccttgctgttacaccagacgcgggagctggatgaagcccgggcgcacatgcaacagcaaaacgtggagctgggcagcttgcgaacggaggtcgccgcttgccgcggcgggggggcacttcagcagccagtttggctcgcgccttccagcttcaaggtcaagtggatcaccaggcaagcgagatccagaatctgcggcgtcacgttgagcggattgagcgcgaacgagatcgtttgcaggagaataacgatcacctggccaccgaagtagccctggccggcgccgagatccaagagcttcagcgtcggagttctgatcaagagcgtgacttgcaagatgcaaacaacgagcggaacctggccgagcaaagctcacgccgtgcgcaggaggctctccaacgagttgaagcggagctcgaagccagggatccagctcccccagcggaccgccaagaaattcagactctggatcgggatcggagtcgtacgtctctggccgaggtcacaccgaatttcgtgaaggctcaagaggatctaagtgcccatcagcgcatgcaccgcgaagctcgcgaggagttgaaccgccttcgagccgttcacatggctaccctggcgggtctggatcaagcagtccaagcgcatgccgatcctgaactcattcgcctacgggatctccaggagacgaccgtcgcggatctgactcgagtttgcctccacttccccaggcgtgccgactccgtcacctggtatccagggctagcatcacgacaagctaacttaactgaccccaacttgaaccggccggaaccgacggatctcctggaagcactggacgagtgtaacgatgaagatccatggcgcaaccactaccgagacactcctcaatatcatcctgcgcgtaacgttgcgcgcctcccggccaagttcttcaatctccgtgcagttggcgaccagtaagggctggatccacggtgccagatctcaagtagatccagatccacagatccttgcagttgagctaattacgcaggaactggatgtacttctgcatgttgtagtcggcgatcatacgctcgtttcgcttctgttcgtgccttctctttcgtgtccgatccgacatcgctcctcatgtcacgacaacccagtccgcttctcgctaccccgatccaccttcgcgctccaatacagctcgagcccgtagatccggatccataccacacctctttgcgatccagacccaatattacactccgatacagctcgagtctgtagatccagatccatgccacgcctctttgcgatccagatccataactacacaccactctagattcagctgaggcgcccttgtcatcaccagatttttctttcttccacctcactcgagtgcaacgagccccttgttattccatacacaaatacaaaattcccaatccaaccaccttgcagatccatcaccacactttctacccaaagtgaccaactcattccaggagaccgcagcccccgctactcctcgtgggactgcatcacaccgaaccggttccggttagtgcggctccgcagaaactcatgtagtatagcgccacagttgagatccgcttcatccacccaggatggatcttcatatccacgccagtgtaccacgaattcacggtgaatccgaccataacgagtgcgctttccagtcctcatgtccgtgatttctccacttcgtactcgtcctcttctagatcctggatccagctatcctccggcaatagcgcttcattaaaatcgtatcgatctgtggtaccttcggttagctggatccggggccggtctggaaaccttttcaccagcttaagcttggagacgtgaaccacaggaaacaaccgatactccgtacccggggactcgatccgcacagcatactcacctatcttctcggccacgcgaaatggcccatcccacatatgcgccagcttgcgagtgtacccttccttaacgcgatccaggtacagccagactctagatccaacttcgatctggtgcggatggatctcttcattatgccgatacgcccgatccgagatcgcctcctgcagccgcatattgacttctgcccgcgcctgttggtaatagcgttggatcttgtattgccaccgccgtggatcccgatcctggcggcgagtattgcctaccgagattgtggcttcaagtgtggatctcggatcccagccatgtaccaagtaaaatggtgtttctcctcggatccgatcttgggcagtattaagcgcgaaggtgagacgctccgcgtaatcatcccaatcgcgctgatccagatgctgcacatacatcttcagagcgcgagttgctgtttgcaccatgcgttcggcggttccattcgcttgcggcctgtatgacatcgtcgcacgttgtcgttgacccaggatccggttgaaggatcggaagaagtccgccatgaaccccggctcacggtcgtgccggatcacttcgctagcaccgaatcgtctgaaacacacactcttcgtaggactccgcgattgtctgcgcagttatggagtcactggccttcgcgatcacgtatcccgtaaacagatccacccagatcaacaactcggtattacctttgttggatctaggcagcgacggtatatgatccatcgctataatctggaacgggtatgtggcttggctgttcccaggcgactctccttggatcgtgggtcgtcctttgcccgtttcgcaatccacacactctccgacatatctttgaacactccgatacaaacctctccagtgaaagcgatcccggattcgctggtaggtgcggccgattccttggtgacccccttccaggctgacgtggtaatgatggagcacgtcttgttgcaaggtctccgggagcaccagcctcatcaaccctccttcttcttcgtcggagggcagtagaacagcaagtcgttgagatccacttcataatccatcgcaatagcgctataggagctagcctcctcttgtgctagttcctggatattgcccaccaggtacttctttaggccggagatccacgcctcctcgtcctgcgcttgacggatcctggcgatcctgagatcccgcactacttcctcctgtaagacagtagggctggatctggatctggcatgtggtcgggtatcacaggtgatacacgagcgacgggagcatcttccttactcttcacaaccaggatctcatccagtcggttcaacgtgaccagatcctgcagatccacctcgtcctccaccatgatcctgacacgaggcggtccccagaaaattgccgacgatgtgccgtcacctctgtgacttggattttgtatcggatgctgattggtggatgacttggatacggcgcagctgtacccgtgtgacatggatggcgactgtgggagagaagtgatttcttgggatgaatccagcgcctgaccgcagatgggcccaactggctggaagtgtgaatcctgggagtgcacgcccaggatgccagagaacactcagtccggccgcggactttcccttacgatgagtgcctaaagtctggcggaaagtgtctctggcgaatgtatcccagagtacacctcatcttgctgtggctcagagtgccccagaggatcaaattaccctgagaatcaacccactaccaccatgatcatgcgcaggaggccgctaaatccgctagaagtgtggcattatggagatacaggcgagcctgtaatgcagcagacttgttacccagagtgccgcacgatgacccagagtgccacacgatgacccagagttcacctccctgagtgcaggtggcccagagttccaaagatgattctctcggtttggaccataaatccagactctctatactgaacttaagtgtttcccaagccaacacccaagaatccctacagttcctcaagattcctcagaattcccaggatttcggaagatgaccctgagtgtcacctgattctcagggattcgagtcagttcgaagtcagtctgcaagtgatgcgtgaccttgaagaaccattgtggatgcgcagactggatactttcgaggcgtcgagagggagtcctgcaccatactaaaccaagtctaaggacccacaattggtactttcgacgccgtgtgacaatggaatcgcaagccgatcgcaagtttggaccgctgaacccaaggtatactcaagacaagacatttgacctcaagcatagtaaacagaagatatttgcccgaagaagaatgcagaagagaaagaagtaagagagagagagaagtagctgataaaagacaaacatagttcaattttccctgtactgcgcaagtgacttcggccaagcctgccgacggaaatccggaggacccgagactacgacagcgggacgctaagggaacatcaacggcgaaggacagccgtctgtgtggcctccatcaactcaagtccagttaagtggggaccggcgtcggccttgagcctcctggagtgatccatctattccatatcctagttgggtcacgtgatgtgcttgtggtagcccatttcatattattccagagggtattctggggtgctaggtagtcgcctccaggattttgtattgactgcttgtgtgaagggaaggtaactgatagtgattgtattttcctcctttattggaggtggtgcgcgtttgtgtgagtctcaggggagctaggtccctgaatttcagactcgagtgagcctagtgtgtgtgtgacccaccgtccaagggtccaaaagaataagtggcggctagttgtagtgtttgtatactctgtatttgttggttttatcgagctaggagggcatttgggtaaggtgtcttctgagttccaagtcccggagtcgactgaaatcctggaccctgaattcgtgatattctgggtttcaggggatctgattctctgggtttacctttggtgtggaggtgcgttctgaagtagacgtgcgctcccgcacttcttcgaggctacatttacaatcggtggagtgccgttccgtcgaagacaaacgagccgacagggattacacaaggtacccacgccaaccaaggagtgtgattttcagggtttaaagctttgcggctgcgaatctctgggtctatcttcttgctgttgactctcaagtcgatccactgggtctacaccctggggaacagtcttgggctgcgctatacgaacccccctgggcgacaaaggtttcatcggcctcgcctcagctggtgcgcgtgcccggattcggttgtcgaggatttcgccggaaccaagtgttgaagaagtgctgagtgcccgtcaacctcaagctaccaagatgcctggaggacgaggagcgaagaagagtggacgcggtgacggaggacgcggttacggaggacgcggtgacggaggacgcggttacggaggacgcggtgacggaggacgcggtgaggcgtcacgtcagtcgcgtcgtgttcaaggtatggagcctgaggagcacaaggatctggaaacagtcgtccgcgacgctcggaaagcgaagaaggctgctggcgagagcgaggcagtgcaaggtggggacgtcgaggcgtctgcagctcaagatcagcctgctgctggatcgcaaactcaggaggaagaagtttcccctgagttctaaggttcgacggaggtgaattctgggttgcggattcctgaagtcccagaggagcacacccgcgagggtggtgctcaggcgtctgagggaggcgccaatgcggttgagcccccggaggtgattgacttggtctcatcttcggacgaggctgttgtggaattgaagccggagcccgtgcgagcgaaggaggaggcgaagactcagagttccaaggtgaattctgggttcgcaccacctgaacccagcgtttcagcgctaagctcgcaagcggcacccaggaggacgcctgaaagcgacatccgggaagctgctgcgcctgctccggaatcgggagcagcggcgttggacactgagagcatggtgctgtacgtccgacgtgaagtgcgacgctgggaacgcgacgagtcttcggtttcctgagaatcgaggcaagtagtgccatgtcggggcattttgcaggtcgcggcagaatcttcgtaggccactgatactcaggggtctcaacacatgatggctccagcgcagccagacgttctgcacaaagtctgccctcacgccactgaacactctcccgaataagagtctgcgcttcgctgaagacgctccaactcagactgaagaggtgccccctgaagaccctcctgaactccgagacgttgctgttcatacgagtaacttgggtgacgttctgaaggaggcggtgaccgatgttgcctcgcaggctatcggaaccccagaggacatgcgtcctgaagatgatacgaccgctgaaaccctgagtttacaggttgaagttggcagtgattctcagggtcaggtgattctctggaagtcgacgtggatgacgacgattctcagggtgctgttgaagattaatgggacatcccgatctcagggttgccaggaactccgttggagaagctgaagcaggagtatgagcgctgtatgtgactctcgacagaggacctcgactacgagcctgcggtttacattcgcgaaggaagtgagtagttctctcagttgcgcgaccagttggttatgcttcctgagatgcgtggcttgacccctgagtgcaagatcgaggaggcagatgttggagtccctgggaaaacgacgcctgagatggaagaccaagtgaggcgaattctggaatatcatcggaagatcttcttgggagacggcaaagcagccccccccccccccacctgcccgtggagtggtttgtgacctggatgtaggcgacgctaaacctgttgcccagcgtccaaggtccattgcaccacacctgtggaccaaggtgtacgaacatctgaagaagcttctggagaacgggctgatcaagacttctacgtccccctgggcatctccaatcgtgattgtcttcaagaagaatggcgttgacatccggatgtgcatcgactatcgcgttgtgaatggcttcaccaagctctcgcactacccgctgccgcttattgatgatcttttgattggctttgagtcggcgatgtggtttatgagcttggacatggcgaatggtttctgggctatcaagatgaccgagagagccaagttgatctctgcgttcgtctgtccctatgggcactaccagtgggtcaggataccgtttggcctcaagaacgagccgctcatctaccaatcagttctcaataactgtctgtggggatttctgcggctttcccctgaggaagaagctgacgtcgaccaggatgtcttggacttttgggggttggactctggggaacccagagtttcaggtgaaaatgcaccgcgactctcagtgttgacggatgagatgactgtttttcagcgtaacatccctcctccctcccagatgggccctgtcctgggtcgaagctcgtatatcgacgacattgcccacggtgcgcctacttgggagcagctgtgccaggatctgaacgcgctgttcttccgactacgttactggaatatctctgtgagtcttcccaagagagaattcgagaatttgtccattccgtacatctcttacgagattagtgctgagggtatccgggcgacccctaaaatcgcgaagggggtccaagacttgccgtttccgacgacactgaaaggcgttcagagattcatggggagtctgaattactacaacacgttcattgaagatctacccgtgatcgcggccgtcctgtacgagctgactgaggaacaggtgaaattcaggagagacctgtcgagagcccaggaagcctttgaaatcctgaagcgcaagattgtttcgactccgttactcagacatcctgatcgttcaagacccttcgtgattattccccacgtgaacccgtgggcagcatccgctgtgttgggccaggagtacgacggaattgtgcatcctgttcgattcacaggtcgcgtcctgaatgacgctgagctgcggtatcacattgcggagaaggaggtgattgctatcctgaaagtcctggaggtgtttcgcactctggttgaaggcagccctaagatcgttgtctacacgcgatactctgtgttgaagtggttgccgacttcgcagtcggcagacggtcggacggtgaagtggggcctgaagttgtcccactggaacctagagatacgcagagttcaacgcgatgaagacggcttggctgcaattccgggtgcgggtattaccccccagagaacacttggatgagatcgctgaaaacctgaccccagccaaggggcgcgtcaaacctccagtgtctatcagtatggaaatgctggaagcgaattgtgaggggtgtattctgagttttgatggcgccgctaagacttccacgcgacaaggaagctgcggctgcattctgtggcatgtccccgggtgggaaatcctggatgcccagggattcatcctggaggacgtaactgtgaatgacgttgagtatcatggacttctgatggacctcactctggcgattgagcgtagaattcaggatatcgttgtggttggggactccaggattgccatccagcaagcccagggtctcatcaactgcaatcagccaaatctccagaggaagctggccgagtatgaagtctgtgcggctggtacatgtcaagcgagagttcaaccaggcggcagactacctgacgtctaagactctcgcgcttggcgaatcctggaagggggaggatgctgatgaacggacacatctgcagttagtgtccaagatccacgagaagttggtaaagccgaaggtgttattgaacgttggaattcaggggagtgattcccagtgtgtcgaaactctgggtattcctggacctgagtgcgctccgttgtctgtggcggccaaagtgtttgcagtaatgactcgggccacggcgccgatcacgcgaacgcagtgagggctatcctcttccagagccttgtctcgctcaggaggccccttcaccacgcacaccgtgccgcccacctggaacggcacgtgcttctcggccttgcccggggcactatccttgcccacgcgagcctcagccactcctcgtttcgcgcgcagcttaagcttctcgcagatggccgccgcctccccggcgtaatatcgttcgaaccaatctgtcaatacccgcagccgccattcgtcgacccccttgaacgagactcggagttgcccacgtagccactccttctcgtcctaggtcaggccggccgggttcttatcacggaacgggggcaccttgccgtcggcgccatcctcaccgtccctcaccaaccccttcagccgtcggtgaacgaccttccgtatcaccgaccgactggtaaatgggaccgtcttgtcttcacggtccatctcgtccatggtctcgatctccgacgctgcctcgttcgtagcgagactcgagcacgcattcctcacgacttcctgctctaccgcagcctcgtctttcccgtggtccctcgctgactcgataatcccctttccattccaccgctcaccccagccgcggcactcgtggcctcgacgactccttcgcgcgggttgggactgtcagcgacggccgccaacgggccagtcgactttgcttctggtttctcgtagggcccgtgccccttgaagtcacgattggctcgctttgcctcgctggacaccgccagcgtcttatcgtaccattccagccagtactcgggtgtggagccggcacgccgcgctacctccttcgtccgctccagcttctcgactggaattccgagcaacttgcttatctcctcgatgctcatcgccttctgcctcgcggcgttctcctgcatccgccgtttcatttccacttcgtcacgggggaacagccgttcctccaactccttgtcgtactcttcaggttcgtcgctcgccagcccatactcaccctgttcgagcagctccagctctcggtcggtgaacatgcgtccatagcgagcctgagatgctctacccttggtactctcagtcgaaggtgttccgccctcctcggcacggccctgaatatccgactcggccgtgtcgtttgccttggtcacggtggagaaccgctccagccgcgcaacctcagcatcttcaatgcaatcttccagcgtgtccatgccagaggtaacctcgcggggtaaccctccagcgtccagacccggcgctgcttattccgtttgatcgggacagtgctttccgtcgcaccacccgcgtttgccatatcattcgggccagtgccctccttcgcaccgcccttgtcgttcatgttgcccacgacggcgttcttcatcgcgccgtcggggtccttgtcgcagtccgcgcccgagctcttcgatgctccggggacgcgcattccagccaagacggagcccgcacgcaccgcctccttgttcactttcaccgtgacggagctcttcccgcgcccgtccgcggtcaccttcagcacgacgagtttggcttcgccgttctcgctcgtgtcgtcgtccagtccttcatcggcaagtgtgccacgcggggcagtacctaccatctcttctgtttcaccactaactttttccgtcgattccccggccagcacgccaccgtcttcgtcacgcgacgcgctgccttcgtcctgcagagcacccaaccgttcgccgatttccgccatcgccgccacgacgtgctccgctgtgtcgcccgtcaggcaagaggaaggtgcgacacttccttccccctcctcctgccctcttcacgctcggttcagggcctccgctggcactgcggggtccttcccggccaagctcttgagcaaattcttcaactgcgccttgtacgggcacttcgccatgaagtggtccgtgccgtcacacaggccgcactgcctcgtcctttggccttgagcaccaccccctgcgttgccccgagaaccgtcattcgtcggcgttctgggcaagtagcattccacggagaagtgaccgaactcgtcacagcggttgcacgtccccttacctcgggagcacgtcaagcgactgcggttccgtcgctcgcagcgaccgcagaccgtctcgccttcctgggtgcgcgtgccaggcgccatgcgaatatggagttgacgctccgaaccaccaccacccgtttcactcgacttcgcagccgccgtctgtgccggcgccgcggcattgatcgagggtcggcgaggagaacgcggagcctgaggcgcagacgcgagcgccctctgctgctgcttcatcatcccgtgcatctcgtgcacctgatccgccagcttggactgctccgtcttgccaccgccggacgtcttcccgccctcggcgaactcgtcctcttcctccactggtcgatgcagtcccttgaacaagagtagcgcaccggcctcctcgatcgtcgagaccacgctcgcgttcagcatggcacgcaactgcttgttgcgaaggccctctacgaagaactcgtaccgcatgcgcggctcgttgtagcggagcgcctcgcacatcctgttgacgcggtcgccccactcctcgaccgactcgccgtagttccgcctcgccgtgcgtagctggctccacatttgagccggggtacggctgaagaaccggttgtggaagcggatcttgagcgtcatgaagttctcgatcctggagttgtaccaccacttttgaccaaccttgcccttcatgcactgctcgaatgctgtcaaccgcagagcgtcatccatgctctcggtgcacttctcgaacgaccgccagaacgcagcagcacgttcgctcgatgcaacctccgagtagaacggcacgatcaccttcaccgcattgcgaagctccgtggggatgccacccacgtgggagcctccatacgcaacactccttgcctcgttggtcgcacctactcctccaccttggccagctccaaacgcgggagcgagaccagccgaaagagggacagtgtagccggcgtacccttgaccgtacccgggcgtctccgacgtcaccgggtgcatgtactgctggtagctcggctgctgcccgtacgatcccatgcccatgctcaacggagtcgacgcggccgcccctatcggcgttgcagccgcgctcacagccatctgctcactataggcaccaggcgcagcccctgcggactggctcatcggcatactcgccaccggcgtcatcgcgctcaccggctgaaacgaggggtagaacgcgctcgcgggcgtcgccccgcctccgcccatcggcgtctgcgcgatcgtcagccctccgtacgaggggatcgtcgccatcgacaaagcgctcggagtcggcgccggaactatcatgtgcgtcggcgtcggcgcggacggcaccggtcgagacatgaccgccgtagtctgcacaggcacgctctgcttcggagccgcgttcggcgtcggcattcccgtggccgccaccgttccagccgctcccccaagatattgctgcagtggctgccgcaccaccgagtcgaggtacgcccccgccgaggggttcacgttccccggagcgggccgccaccgtcggctgcgcagataccaccggctggctcactggccacgccatgctcgtagcttgatacgcttgggcagccgcacttgacgtatgcggcacctgtcccgtgcctcccgcaggcggaggagcttgtctcgtacctcttgccgtcggcggaggtagactcgttcctcctccctgttgaaccgtaggaccctgggatgccggtggaggcgtgctcaaagcccgcgtaaatacccgcgccagcaattccacgttcggattcccgctcgacccatgagtcccacccgacggtaccggtccggtacctgccgtcgaagtggtactcgcggaactcattgtcgagggagccgccgaagccactgtagtcgcggacaccgtggttggaggcggccccgtgctcgccgctgtcggcggaggcggtcccatatcgccgctacgtcagggccctcgtcgtcctcgttcttgtaggggtaggggccggagcaggggctccgctcgctcccgccattgacgcggccggcggagttgcaaacgcggaagtcggcaccgcgctcacatatccaggcacgggcgtcgccttgcccggcacactctcgctcggccttggccccgaggacgtcgccactaccgtcgccaccacgcctgtcgtcggcgcagtcgtcgcaggcacgtcccgggcctcaccgccaactgccgcaggagctccttgcactagcttcgcagggaggcgtccagcgcacgccgcccacgcgacgtctccagtaggctcgcacgcccctgggcctcggcgcccatcctcaggccccgccgctcgggcgcctcgcccacgggcaccgccgagacctctgcacctggagcctcgtcgtcttgcccgatagcttgctcctccgcgatcggacccagcacgttgccagccgccacttcctcagcgctgacctcgctctcgctgctgccgaacacgtccgtggcgccctcgaagtcgaagtttgactcgctcccgtcggtcacgccaccaccctgccagttccccaccgccttcttccatcagcacgccttgatccaggcgcctcgcttatcagtgagaaataccctgcttctccaccaacttgtcgcgatcctcctccgttagggtcgagtacttcggccaacaaagagtagacgcgtagcttgctggtaagacgctagaagataggaaggcaatctcgtaaaaatgcaaagggtttcttgctttcaacgaggagaattcacgactgaatccttcaccacatcatgcgcggccgacggctaccccgccggcccgcttcctttcctaccgcaaccacttggggacgccgcacctcccgtgcacgagcttcctggcgtccatgacacccgtccttggcggctggcgaccgaacgttccgcgcccagcccgccatctcgtgtcatctttgccttgaagagtgggataaccactcacacttgatacgcttgcccgtcctgcccttgctcctcttgaagtcgcgcctcttcctgctctaacgcgccttcgagcatcgtcaggaaagctgtcagtcgaggtttcagacgtgatccgtgacatacctgtgatgcatggtacctgatcttcttgccgcaggaattcataaaaatcgggaaaacgggagcggattctgattggtttaacggcttgtgtcccagtgcgcctcatctttgcggggattattaccggggagcttagctacaagccgagcgcaaaggtacaaatattttctcagatacattatggcatactttatcacataacgtaaattcccgaataataccccttacccgtatagtaccctctaaaatgtaacccaatgtgtatcccagggttacaatgttacttccatacaaagatcaagtatatatttaggaatttattgtcgaaatcatgtttatactgtgtaatattcataatttagcatatttgttttgaaaatgggagggtactaataaatagtgcccggggtattattcggtaatttccgttagtatttcttatgctgttcagaacagcataaggcgttttcttacatgttatcacgtccttgtcacccctccgcgttcaaggggttaaaagtaaagcagtgatttctctgattatttctggcgcgtcaaattcgagagtcaattgtgcttcttcgcctaatgaaaaagtcgtagtaccacgtatttaaacggctatcgtgcaacatgagaatgcaggatggctgtgttcagataaaactgacgaggctgtatatggctgctgcttcagtgcgatctacagttgtttgcagcaaacttgatcacggttgtcaccgctcgcatagtatagcgtacgtatgcattgccaattacaattgcccaagcgacagtgcgcaccacgaggaagacttcgtccagatcacgcgtggtgcagcgctcaatcgagccttgtgggcgcccgtgagctggtaggtgttgaacggcacaccatgagttcattcgtatagcacaccctacggtgacatgcgtgctcatgatcccgcacgtctcgacaccatacacagagatgtacccgagccggttcaacacgctcagttgctgctgaaaatctgggaaaagtgagagcgaatcgttcgaaagctctggggtcattcgcactgaacagggtttcatattagagatcttctccgttcgcccgagacaagggacaaagtgatgcaacggtgaagagtgagtaagcatcatcgctggcgttgtgaatagcccggcgcgacttcgaggtcattaatgttgagcttcaccctttgtgttgaaacagtacccgcgccagaaagtcaatgctactgctgggtccttcgtaggcaatgcaaggtctaggtgtttctggcccaagctacaacacagaggggctatccgcgaagtgtcccgaagtagtcgcaatgccaaagacacgctattcagtttgagtgactggggcaacttggagtgcaaatgtgtgcttcaccattagcgttggtccttgcgctcgacccggcggacctcccagtgttttactgaagacgcttacgatgccattgcacggccgctctggacataattccactcggtggccgtgcacttcaccaatgacgatcatatcttgtcgaggaatcgcgagccagcgtaatttgtgcagaacgaggaactgcgctccatcatcgtcgtccatactcatcatcccgaagcatttcagagtgtcaacgctgtagcgaagctcaccgtcctcccatacatagccactcaggagaatcatcttcgatcgaactcctagcgcagtatccacaccgcattgtgccgttaacggatcgaaagacccataggtgtatctaaccgcaatcatggcccccaacgctcggattgttatgatggcaccgacaatccccagcacgatgatgccgtggcctaccaagctccacacgtaatacgatacaacctcagctgctggcttggaatctctaaggctcgaccgatttaacgatgtgagatagtagtgcatcactatcgcacagaagaactcgcccaccatagcagcctcataattgaagaataggcgcttgagcaaacaacgccacttctcgctgaaccagttcatgctctccaccatttcaaacagcatcgacagcactccagacaaattatagcccaacgaaatgtactggaccttggcaatcaatccgtcctgtgcgatgagcatgaacaagtcgctcatgagcccctcgaccagaagatacagtatcgctgcacgatgatagttcctcgccccgtgcgctgacagtcgcaaactctcctgcacgtacaccaccgcctccttgaacagcatcttctggtgcataatatcgcttcgtcgtccaaagcgtttgcaagaaatatagctcctcctcatcagcatcgatcgatatgcaatccagactgctccgaacaagccataccagtacgagctcctgtacagtgcgtcacccgtatcgttcgccaaatctgcaccattgctgtcgtaagtcccgagaccatccacctccacgtacgacactttgtcattggcgcaatacgtgcccgacgcttcctcgtagaacgcgtaaaagccgatactgccgtggtaaaagtagtggtggaacgggtagctctcgttggcgcagcttgctggtgttgtacgggatggagggactttatcgggtccgagaagataggctccgtgaatattgtattgcggcacgacaaagtggcagaccctcccatccggaacagtgtagtaatgagtgtccacgacgttccaccaggcccccgcgatggcgagtccttcaactgggcaaaagttctcgaggttcgccgtctcggccactgaatctgcagggacgaccaagtcctcggtgattttgtgtggcgtcatgaacttgatgtagcttctgacctgaagcagtagcggcacgagtccaacacacacccatacacagagcaggaagcgcttcgctgtgaagggggtcgtctcctcgcgtagtgctttgcgtttgtcgacgtacttgccgttgacgtagtagacgctggatatccttcgcatcggagctgtaatgaacctactgacgcttcgggcggatcgcatcgatcgaatgggtggcatcctggcgcgttatccccggttgctcttagaacacgacgaacttttttgtggctgactcggccgctacaaggcgatctgctaactggtgtcgggtcgacaaagtgtaggaaaaagttatattcatagaccacgaacgcagcgcaatcgcatgaaacctgccatcaattttaggtcacgttgattcacatcctcgctacgataatttaaaacacttggcgctacagtatgccaagcgccgccaagttatcgccaatcttagtgacggtggtgaccgctaccggcttctcttaacactggagatgacggagccccagttttctggtttatttattttttatacggtgttgctaggtagggcacgtattttcgaagtcgtgtatagtgcactgggtctactaggtttcaatagagaaatctattgtccatttctaagtattgaacgggaggaaaagtggtcccgatgccctcacgcgacgttgacgagcacctagactcctacttttaagcccgtacctaaaagtacaggtgttcgtccacctccttcatcgcctcctgtaatttcgcagtatcaagttcggccactatcgctttcaaaggcaatcctctgcattcgtttgagtcgtgttcgtttctctcgacacgaccacaagcgcctgagccaaattacagtgcctgaggtgttggtgggttgctgcatgtggactcatacatagattagatgctgtatgaacgttcaggtccttctgtcgcgtggtacgttgacacgaagacgtacatctagttggtaacatcagtttgagcactatttgttttatctgatggaaaggcaagactttgctctacaacatacacgaagtagatgccgagtgggagctgatagatgtggcgttcgatcatggtctcaccacctccgagctttcaacaaaacggctgatgctgttgccaatctggcaatggacacgacctgcagcagacagttctcacatttgaattcggggtagaaccgaatggagtctgggcacccgctttggaattcattagtggtgatctccaacactggatgacaggagcagcacatgccgatgtctcagcactttcagcgctatcgtccactccataacggacggtactcaaaaagggtgcaagcttgcagacgacgtaaacgagcggaagcaggaactttgtattagaagtcgttagagcgctaagtgactacaaaacaaaacaaaaacaaaaacgtacacgaagtaggtcctttgaggctgatcggattggcatctatgtttttgatacggtaaaggcgttttaaaatctggtttcgacttaaacgatagctttcatgctatcgccccgggccaaaatatttaggagaatcttgaacgagaatcagcgaaagaaaaaataaagttcgatatgttcacttcatgctcgattttattttggtctcgtgacttacgagtcgtaagttacgactattgctcgaggcagcggccatacccacgtgtgctgctatcaagcatctacttggcgccatgggcagccttcaacgcctgtaaatcaagccactgctgtaacttgacttcagactccttccattgctttattttttcggcttttggggccttcctcgcagccttggcgggatcacgagcttgagtttctccaaaaactctttcagccctctctcttcgtcaatatcgtcgacacgacgaagtattcgtccgccatccgcgccggttaaggcggtggttccaggcgactcaccgttcttgaccaaagcgttggtattctcggccgacgggacggatgcaccacacgcatggagagtggccacaaacaccaccgcgaagatgaaactggggcgcatactgcgggctaactttctggagtgctgcggagtaaaacgcggaatgatggagagcggtgtgtggacggataccgacagtactgtagctctgctgccgattacgatgcctataatcagtcagtgcaaaatgctcgcgaccaacaaccttcgaattacggacttggtaatagcggaagttgaagttgccttttaccgtatccgggcagtttaaggccagacgtacgtggtccacgccgatcaactgttaaaacgcatcacaccatccagacccataccaactatcccattgtcgtgcgaatcaattgcaatgatgctgcgcaatgtgtggctgcgccatggcggctctgcccggcggctgctgtcgacggcggcaccgtcggcgtcggtgaccgaggctatggagcgcttccagagcgtgcccaagttccagcagtacccgcacttcttccccgtgaccatgtcattgcaggagtaccagagcaagttcgacgctcttgaacccaaagctcgttgcacggacgagagcgtcgcattggcaggtacgtcaatatttacatcaaaatgcaataaagcagtgtaaatttacgtgtttgtgtgggtggcaggacgtattgtggcgatccgtcacgccagcaagaacctcgtgttcctggatctgcagagcgacggccacacggtgcaagttttgtccgaagtcaagcactttgaaggtcgaggagatgcagctgctacgggagacagcgaggcagtgaagaaggagtttagggcgctgcacgagagtctgcgtcgcggcgatattatcggagtgaaggggttcccgggcaagtccggcaagggcgagctgagtatcatcccgaggcagttggaagtgctggcgccttgcatccagcccttcccgaacagtaaatacggcatcaaggagccggtgagtggcgttagcttagaacggtttattagcattgggtgttgacccgaaggtcggttttgaattttgatgttgacaggagatccgcttccgcaagaagtacctggacctgctcacgaacccgggagtgcgtccgatattcgagacccgcgcaaaggtggtgcgaggaattaggagatacctggaggaccgtaactttatggaggtggagacgccgatgctgttctcggcggcgggtggtgcggctgcgcagccgttcgtgaccaactcacgggcgctggggaaggatctgtacctgcgcattgcgcccgagctgttcctgaagcaattggtcatcggcggcttcgaccgcgtgttcgagatcggcaaggtcttccgcaacgaaggcatcgacgcgacgcacaacccggagttcaccatctgcgagttctaccaggcgtacgcggactacaacacgctcatggacacggcggaggagatgatctcgggcatcgccaaggatgtgaccggatcgtacaagatccagtatccgatggaggaggcggcggccgatgaagagggagatgccgctgaagacgagcccgctatggtggagatcgacttcacgccgcccttcaagcggctcccgatcctcgagacgctcgaggagtgcctcggagagaaactgcccgacgtcaactcccctggtgcgactgcgtgtacgtagcttattgctgtgtattgtgtgtgctcactagggctgtatctcatgctgcagactcgatcccggcactgctggagctgtgcgagcgccacaacgtggactgcgccaagccgcacacgtgcacgcgtctggtggacaagctcatcggccacttcgtcgagcccaagtgcgtgaacccgacgttcctgttcaaccacccgacgtgcatgagtccgctggccaaggcgcaccgcgagcagcagagcgtgaccgagcgcttcgagctcttcgtggcgggcaaggagctgtgcaacgcgtacacggagctcaacgacccgttcgaccagcgccggcggttcgcggcccagcaggcggaccagcagcgcggcgacagcgaggcgcacggcaaggacgacgagttctgcacggcgctcgagtacggcctgccgcccacgggcggtttcggcatcggcatcgaccgcctggtcatgctgctctcgggcaagccccacatccgggtacgttggccgtcttgagctcttttgcttcattctttgcacttactcgtggcgtctgtattgccgcaggaggtcatcatgttcccggccatgaagcccaaggacgacgctcctgctaccgagccctgagctcagagtagccatgcaggccggcagctcacccgctcgttgaacttgccgcgccttcaacttgcgaacagttgtttaacaatccgggggccgcgctccaagcagaagaagtcggagattcgttagcgtcccatgtcggacgcgccgtaaagcaatacagtagaagcaggaatgcaggtgcggtacatgttagtggagaccccccattttggccggcgatgccgcggcccgccgggatcccggccgcagaccatagacgaagcgcgggccaaacgcttgcacggcggccgcacagacgcgcgctgccactcgcgcgggcgcatgtgacaaggtgcgatctcgaccacgcattgcccgcccgctcgtcatgctcgcccgaaaagtatctggtctctactagtagcctactagtctctctactagtagcctcctagagtctaggatactaaactttggaatggtccatgacgcgcggcgagtaagcacgcgtgggcgccaatcgcgggcacaaatcgcggccaaacggggctccgtacgctcgcaactggaagttgagtctacagtgtaatccccgtccgcttccaatcggaccccgtaccggtgcgatgcaattgcacgccggccgtggccaactttgcaccagcctgacgtgactttggcggcagccagctgcgagtttagttagacgcaggccacgtcgagcgctccaagcggcctggtttgctgcgtgaaaacttttcactgaaaatcatcgaaattaacgtggaccaaccgcctgcgatttgcctgtggcggctggtcgaatctcgccctcgctgtcattagcaaccggcagcaacggcgcctgcagcgttggcaacggccagctagaggggatggatcgatcaccttcgcatgcggaggatggctggctggctcactcggaatctccttatccgggtagacagacgtgcttacgaaacccaagtggtccgaaaaaacccaacattatcactctcaagaatcacaccaactatagacacgaccgcttcgggaaaccacaagaacgggtcccaagcccccagtgactgatagtggccatcaaaagtgcagccaaaggctcgtccatgcacaccccaagcataagagcggcgcactgcaacaaccgatagacaccctgcgcgtccgctgcgctgctgctccactttctattcggcgtcgaagagcccaagccgcgttccgttattgtgactctcatgcccgtcgtcagcgtgggcttcatcggctccggccgcttggccgagcgcgtggcccgcgagctggtcaagaacgtggcgccgcagcgcaagttcagctacaagaagcagcgcctcgtgtccacgctgctggccgcggacccgtccgaggagcggcgccgcgtgttccacggcctgggcttcaccaccaccgcagccaaccaggacgtgctggccgactgcgacctcgtgttcctgggcaccgacgtgcgccaggcgctggccacgcaggccaccaacgcgcacacgctctacgtgagcctcatgggcgacctgccggcccagcaggtcgaggagctgctgtgccctggcgccaaagtcatccgcatgatgccgcagagctacctggagaaggccggcctgcccaagggcgtgctgccgccgcgctcgtgggccacggtgcgcggctcccaagtgagcgaccaggacatggagaaggtgctgcgcatcgccggaatcgacaactgcgtcgaggtggacgagaacttgacgtcctggtccttcccgcgcgaagagggccagggcctcatccaccggttcgtcaactccatgagcgaccacgccgtcgccgcctccagagcagtgcacgagctggagcagcagcaggaaactgaggctgacgcggaggacgtcgaggcggactttaaagacacttacaagctcggcccggagctcggcacgggcaagttctccacggtcttcaaggccacccaccgagacactggcgagatcgtcgcggtcaaatccatcaaagacgacgacgccctgaccgaggaaggaggcgagatgcttatcgccgaggtgggcgcgctcaaccgcctcaagcacccgaacatcatctcgcaccacggcttctacaacgaggacggcaagtacctgctcgtgctcgagtactgcaaccgcggcagcgtgcgcaagatgctggacgagcacaaggtcgtcccggagcagatcgccaagcggatcctcaagcagaccctgtctgctctcgagtactgccacgccatggggcaggtgcaccgtgacatcaaggcggagaatgttatgctcaccgagagcgaggacgggaacttgacggcgaagctcgcggactttggtctctccgaggagctgcagctggccaaccgccgtctgcagaccatgtgcggcaccccgcagtatctgagcccggagctcgtgtccggccgtctgcacggcacgccggccgacatctggagcacgggcatcatgacctacatgatgctcagcggcgtggtgccgttcgacgaggccaagaacgacacggagctgttcaagctcatcagccttggtgccctgtggtacgaccagccgcaatggagcaaggtctctccagcggccaagagcttcgtgcagagcatgttggacatctcgccggagtcgcgagccactgcaacggagctcttgaagcacgaatggcttcaaggtgcatgagagatggctacatcctgtgatgcagcattattataagtattctgagtgagtaggttcaataagtttcaaaggtaccttttttcatccaatccaaatcgttgtttgtcctctttcaaccaatcacaggtgtgtattttccgcgggtaacaattgcaccagttttgaaaatggcgcggaccaggcagcaggaggtctgcgaggactggagttgcccgctgtgcacgctgctcaacagcgcggacgacgaccgctgccaagcttgcgacaatgagcgtccaccggcgcacctgctcaagaattctcagcccctagaacctcctgcagctgtcgctacaggcttcgaagtgcagcatgtgtatcgtccagcatcaggcgtctttttcagctcctcagcgcgctcccagggcgattccagctccgctgctacgtggaggcaagaaactagactcgtggtgaacagacgacgcggaagttggcgacgaatgggagctgtggagcgagagagcaagcaggagagccaacggagtgagccagggactgcagagcaggctgcaggttttgacgctacggagagagacgcagaacaggaaccgaaggttgcaaatgaagtgcacaggaatgctaatgctatggagccaatggtgaccgtggaggaacagggggagaagcaggaggaggaagaagaggaggaggaggacacggctatggagccgtgcttcaatctactggggtctggggcctcagtattcgccgttccagtggtggaagacgtggtggaggatccgagtgcagccgacgagtcaaagaggcgggaggattgcgaggaaatatgcgatgatgacgatgtggtgcctgttgcatctcctccaaagtatcctggcttcatgcccgcaagtaaagtgctcattgaagaaccattaattgaggaaaagctggcgagtgcagggctggatctgagtgattcagatgatgaagaggaagagcccaagaagctgaggagaaacaagagtggagaggacgacgattcgtgggaggataaatgggtgtgccagatatgcactaatctcaatactcagagcgcgatggagtgtacaagctgcagctgcaagagatacagggatgttccgcgtacaccggagacgacaacgacgactggatcagacttgaaatgggcctgtcatatctgcacgaacctcaattccccggagcgtacggaatgcgatgcctgttttaccgacaggaggaagaatgtcccaactttgaatggggcgtcggacgagaggtggagatgtaaggtttgcacgacattcaacgctcctggcacaactcaatgtgaagtttgtgatcggtcacgtgaagatgagcgtaagaaaccagcggggaaggatgtcgagtgtcctgtgtgcacgaatttgaacccgcccgggagcaaggagtgtatgatttgtgagacgtcgctgcagtcaggtaagctgttgcctcgggtatactcgccatgttgtactttactgatgctgctattgatgccactaccgataggcggtactccagacgaccatttcgtcgacttgtcttccagcccgccagctcgcagccacagctactcatttgatgacgggtatgtcgccctagagtttgttatagtattgttgcgggattcatgcacgtattaacttcttgcttgtgctgctgtgcagtgatctcaacaatccgtacgcagatttgtcgcaatacgacacttacgatgcgcaagacaaagttgccgatccagatcctgacttcgtagaggacatctccgacaacgaggtaaactatacatcgagttgcttacacctttcgacccgaagttaacactcccactttattgcttctttcaggccatgctgtcttcgaacaacacacgcccagccactgtgcgagcggagttgaaagagttcaaccacttcgtgtgcatggaagatctccgcggcgactacggatgccgcatcaactacagtaaaatgtttgctgggcaacggtacgctgggaatctctttctacattgaaagtacaacatatcaccctaattgatggtcttgtgtatccatgccaacgtcgttaggtctcgaaagtcttacgctgatcgcctcgccaccaggacatccgagtcacgaaagcgcaaacgaaatgcagctcgcaaggcggcaggtgaaccggttacacccccgtctcgtggcggcaaagcggctcggggcagcaagaagcggaaggcagcaggtgccacacgacgaggtaagagtattcatctcagaggcggcgaattcattagccccccaaactaacgtcctttgcagcttcgtcagctggtacaaaggcatcaaaagcgccgagaggcaagcgagcaagaaaaactgcggcaacagggcggcgggccagttcagcaacgacgtcttcgccaggcattaaccactacgacaactcgggcttggatttgggcgaaggcttcagcaccatggcgtgggaaggcgtcggatccgcgggctaccactaactcaatatctaatctgctatttaacgcttcgtcgtgtcttgacccagccacgtacacatccaagcacaagtctgcattgctttgccatctgctattttgtcgaaggccaggatcctttcaagagtcgagcgacggttcaaagacggcagcgacttgcgtctcttgagtggttattgcgcggatctacaaacggaggtaagcctgccatgacgacgctggaggaagccaaggccttcttgaagaaggagtcggccgacgggacgaacctgtacgaccacctgggagacgtgctgctcaagatcatcgttgagcgccccgagaatctgcatgagacctttgaaaatatctccgcgttggtgaagcagcagcgctatctcgcgccccaacaaccgccgaccgtggatgctaacactcagttgtcgagctttaagaagcaagcggtacgttgagtctcgttctctcataggagcacagttcaagtggatctaagcgacaattgtcttaatttttgcagctagcacatcaagaaaactggtgcaatgtagctctggagctgctgaagctcaagtcggaggaggaagccccaccagaacctgctactggcgtggctgatctattggacgaagcgaacatgttcgagtgggctgggctggggttttccaagggggagacgttccgactgtcgttggctttgcagcgccttgctcagacaaatggcactgtgaacatgcgcttctgggggaagctactggggcgcggggctgattactacgtcgccgagggcgagttgcctaccccatatgagccggaggaccaagaagcggaggaaggggccacgggagcgaacaagctcacgtactgggtgatgaaggacaacggggcataccagtgggtccaactacctcctgtgcgtcgcgagcagattttagcagcacgacaactgcgtcgttatgtgcatggcgacctggatgcccctgtgcttgggcacccgccgttccccgggctggagaagaactacctgcgcgcgcagattgctcgcatctctgcaggcacggtgctgtgtccagctggatacttccaggtgtccgaagaaggcgatatagctccagccgaggagccggagatcaaggctgccgctgacttggtggacttggggagctggacgcactttactaaggagataaacgctcgctacggtcgcatgacgcctatgcctcctctcactaacgcggacggagaggaggagccgcgtgagggagaagagttcgcaccacctctccgtgctctgagcgaggacaaacccttgtcatggcgtgtggatcgtttaccagcgactataatgcctgcagtgggggaagtggcgatcgtccgcagtctcgtgtggccgggggctgtcagcatcgctgtcggcaagaagttcctgaacgtgtacgtgggtaccggcgtcaagttcatctcggagccattccagctgccacctcctcagcgcctgcaggctggcagtggcgtgggcttgagtgaagacaatccggatgaagagggcaagccgaccttgcgctgtgaagttcctgtggagcagcctgacttgctggaagacccgtcgccaccagcagaagaagaataaccaagctgtcagctacgaggtcagtttatttgctttgcctagctcattaattcttcattcaatcggatcgttggttcggccgctgcagatgtagagctcattgcgggacagtgcccagatctcgggggtgtctgcgtagcgagtgtcatagaggccggacttgagctgaatctgctgcaccagtgtcgagcgcttctcactcgcactcgatctcgaactccttgcggtcttcacctccaccgaggccacgcaacgtccatgttgcagctcatagctgttcactgcttgtgggcgttgcgtatctcctccagcgaccaccacagtctcgtgggtgtccactgcacaacgaaggtttggcaggtagcgcttgggcagtcccgccacgaattccaccactggcttgcagttgcggaggtccagcagtcgaagctcgccattcgatcgctgcaccacagccttgcaacagtcctccaaaacgtggacgtctaggacagaacctgcaggctggcccgccgccacctccgcctcccactcataagctcgactaggggagcgcaggtcccagccccacagcccaccgtccttcgtaccatttagcacgacatgaccctgcatattttgggtaagaaccacatcagtcttaagctggagaaacgttcatgactaaccgtgctgtagaagccctgggcgtggacatcgctggtgatggttcctgttggcgcaagctgaatggttccaacctgccccaccgcgtccacatacgctgcagtcgatgatctggagagggcggcaggtcaataccactgcaacctaagacaatcactagcagacacggacttacccgccacagccgacgctgaagttactcccgtttgttgctgggctcctgatacaaagtaaccagagcaaaacaacattatcgctggggaagtctcacgtgatgcaagtgctcgaaacaaaccatttagctgtccaaggatcgacgaattgccagctctgagaatcaaagagcaccaaaccataagcaaataattccaggtagcacaaatgagagcttcgacacaaattcgcacctttccgcgtgagttcgacatcactgttcccccgccagagctctggtcgcccacacgcatgaaagacacacaaccggatgggcgctgcctgtttcgctggcctgacccgagactgcacacgagcaaatccagttctcggaccggacgccactgtagcgctgtgataactccgtcaatatcgaaactcgcgatgggcaggactctttgcgacggagacgcagtcccaggctcaggcggcatccttctcagccctaggatatccagttgcccactactagctgcaacacagttaaagagagcctcatcaattatttaacaaaaaaacagctccagttatcgtaaactttacctcccagtgctccgagattgctagctcgaggatgcagagccaacgccgtgagtctgcctgcagtgcacacgccctgaggctccaccacctgcgacgacttggcacaaaaatcacaataacattaccatttgccccctacatctcacgaggcctcgaataacttttcttaccaaaaatcccgacagcaattgtggcatcaactctcgatggtctcggcctcgtgcactccagctgaagtcactttgtcgttgggtcaggtagtccacccaattgtgactattgaccccatatcctcgccgaaatttcactttaacttgcggtttttgctcggcagcttgttcttgctgctgtttcagctccaattgttcgcgttgacggcgctccgaggccggagaagagcggaagtagcgcttcttgctctcgtcgtagtaaaaacccggtagagccgccgccgccgccgcctgaggttcagtgggtttttcggcgctctgcttgcgcgcgttggcgcgctgggcctccagagcctcgaggaacttctgccgagccgcttcctcgtcctccgcacgcgcaactcgccgcttcttgcgcgccatgcttgagaagctccgagtacagaaataagtgaaaatgtgtttgctattgcgataatgtatccactattgtgaaagtgtatccactactgcgaaaatgtatcctctactgcgaaaatgtattccaaagttagcgcttctggtggttgaggaagcgcagagcgatgaggccgacgacgcggaagagcacgatgcagccgatgatgaagaagaagaagtgggtgatcgactcgtgcttgaagccgaagtactgctccgtgtactccttgatggtgatgtgacccacagtcacgggggagttctccatcggttggcacccgaatttcgaccccacgttctcatacgcctgcgtgctctcgttccacgtcgggagctcgtcacagtcggcaaacaccagcgcttccatgatggagagagggaaccaaagtggcgagatcttgtacatccaatcgtacccggacgggatcgagaggccggcggactgtaccccatgaacatcatgaagacagtcttaaacagcaacccgaagatcgacgcgacctcctccgagggcatggcgtacgcgaacatcatccccaggtagacttgcatcaataccatgagtgagatggccagccagaagaccacgccggtccagaaatccgtgaatcacaccatggggtagaacacaaccgtgaacaagaacccgctgcataagcagtaggggatctcgacgatggtagagcccacgaagtaccagagcgcattgaaactttgatttgcacgttcacggtagtatgaggcgcgttcagagcacgcgaggggtagaacgctctggaaggtcatgatagcttggaagagagcagccatgtacaccataccgacgcccgagttgaggcccgagtaggacgcgtagtcggcgtcgatggatacaacgccgaacagcaacgcaaagaagacagcgagaggatcatgcgcgtgagggtgtagctgggagtgcgccagtacatcgaaatgaagcgagtaaccacgaacttcatctgcgtgatggagttagcggcgcgcttctcagcaaaaaccatctccgggaggtctggcgacggcgttgtaatgccttccttcgccatattattcttcagtgcccgactgagagcgctgctgttgaagaagttcacgaaatccatgctgccagccgcggaattgctcacaccagcaccgatacactccagcatccacgtcgcagggttgtagcccagcggaagcggagccacaccggggatcgataggaagtagttgatcaagttgcagcagttctcacccaattcaccgaagaacacgatctcgccaccgcgcttgagcagcagcaagctgtcgaacaagtagaacacctcagcggacggctggtggatggtgcagatgatggttctccccgagtcagcgaccttgcggacaccatccatgacgagcttggcagaacgtgcgtccaggccgcttgtgggctcgtctaggaagatcacgctcggttgggcagcgagttcgacgccaattgtcaggcgcttcatctgctccacagaactgccgcggatgatctggtcggcgatgtcttctagtccaagcagctcaatacattcgtccaccgactcgtacttcttggcgtccggaatggaagcgtcttgacggagaaatgaactaaacgtcagcgcctcacgaatcgtagcagcctccgagtgcacgtccatctgctcgcagtaccccgtgcaccggcggatggcgagatcgttggcttcgtagccgttgagtagaatcttccccgtgatcttccctccggtcttacgcccagcgatcacgtccatgagcgtcgtctttccagcgcccgaagagcccattaacgcggtgatagatgcaggaactgcaaagccgttgatgcccttgagcagctcgagagagtccttcggattgtgtgggtcaggcacgaagtagtgcagatcttggaaagccatagtcaccggaacaaagctcttctcttgagattctacctccatggcgtagctacccccagagttcgtgttcttcggcgtattcatcaacgcgtatgactcatcatcaacgggtttctccgagacgtcgacgttttctggggtttcgtagcggagatactcgagtccaagacacgacaggaacatgaagacgacgtagatggcagccgagtagacgataccgtacgcgacccagtacttctcggtgtcaagtccgaacaagtcaagtagtattcacccatcgtcatctcgttgtagctggtgcagtagtcgataccgtcgtagacgcacacgtccattgcgtctgaccggtattggttgatcgacagcgccttgacactccagctcattggactcaaccaatgggcgaaaatcaaatagtccgggaatttccgagtgctcttcgaaagcactcggatttctttcgaaaaacacaagttgccgttcggacttggttccagtatccacgcgccctgcacgggaccatgcgcaggcgctcagtatgcccactgcaaaaacacacggggttccgtgcaaaaacacaaaaaactccgtggtcacaatgaagccagcgaaaacgacgaaaacgacgaaaacgaggacgctgcacacgcttaatggggtcacaatgttcgcgttggggccgattgaacacaagaagaagaaccacatccccatggccaaattcgtgagaaacagcacaagctcgaagatgaggtacagcgagatgtccgactcgaacccacacagccagtagacgagagacccgaagatgatcgtctcgaccagcgccagcggtagttgctggccgacgtggccagcacgtacgaccccgttcggaagaaattggcgcctcgttgcttgtagaaaatctccctctccgccatgtaggtggcgatctgggacgactgccccatggacacgaacatgactgaggagaagacgaccccgagcaccactgacacttcggtcgggtcaaagtcgtagaacacggtgcagtagagcagccccatgaccgtgatcatcaaaagtcctccgaggatgaagggcttgttccggtacgtgaccaggagctggcgtctgagcagagtcaaggtgctctcgatgaacgactggttgaaggttggcgtcggatccatgctttgcgtcgcacaacgcagcagttcagggtcgggtggagcctccagagttcggagcatctcctaatggatcgacgaatggcggaaggcctccgcgaactcactggcactgcgcggttgcttcgtcgggtgctcgacctggcagcgatactgctcggacgtgcccagatccagcaaatagtcggcgatgtcgcgtccaggggggcacgagaagcccagatcttcgaagtatctctcgacttcagagcacgggccatggtacatgagctgcccctcgtttaggatcatcacgtcgtcgaaaagcgagaaaacttcgggcgacggctgcagcagagcgatcacgacgttcttgtgcaatgtatgggcgatgctgcgctgcgtgttgatgatgtcgtacgttgccgcgctgtccagccccgtgctgatctcgtccatgagcgacacgaacttggtgccgaactccatctcgccggtggtgacgcgcttgcgctcacccccagagattcctcgcgtcatagcgtcacccacgatcgtatcctgacagttcttcaggccaagctgctgcaacacaacgtccgggtagtgcgcgaagacagccttgacaatgctcagtgcgtccgcgttctccttgtcactgccctgagtcagcatctgctcgttgtgcttggacagagaacttccgcaaaacttgtcggcgaactccagcgtctccttgaccgtcagcatggggtagtgcttgtcgcgctggttcacatacgacacgaactgaggcaggcgctggataacctgctcgcgcttcacattgttgaaggtgatgtcaccctccaccgtgatgttcttctcgacggagaatctcccactcagcattttcaagagagacgacttgccagaccccggttggcccagaagtagggcgattctactcggcctgaaggcgccgctgatgtccttgaggacttccttccgtaccacgcgcttcttgggcccgacgaaggccttcttgagcgtgttggggatggtcggcagctcgtacttggacccggagtcatcgaccacgacgatgtcggcagtgacggacaaattgctgaaccgcacgtccatctgaggaatcgcggagcccaaagatgtttcgaccttggacgcgaggtgttggtgcagcacttcggccccttcagccatcaacgccgctccggagtcgtagccgagtttcttctccatccttttgatcgtcgagcgagtcttcttggcctggtgcgaggaaaatcgagaatgagtctgtagcttgtcgactctttcctgcccggtttgagatgttaaaggacgattatgccagaacggcagtggcttctacctagcgcagagtaatcgatttataataacttggttgaatcgcgaagtctgtcgaaggacgacaagctatgacgtgaatcagtgttgaacgtcatacagtattactggatctagttgctatccctgactaattcggaagagtagattggctgagccagccatgattacttttgagagtacctgaacatgtggtaagaatggcatcagcatcggccagataatgcaggcgggtgctattacattcatgcaaggctggatgtaccagacacggacctggttgtctagcgatgacgcctgcatgtcgagttcttgacgcagtgttgtaagcgagtgaagcgctcgattgtgccattgaagttgaaacatttcgcggtggctcatcggacttgtgccacttggtgcacaggggatgagattactttcaatgcaaaaaaggtggagtttcaatgtttctaaaaaaagggtggaggttcaatgcatgtatgtgttccgttttagaaacggccatttggtgtttccaaagctgccccggtggcacatgccatgaagatcaacaacgtgccagacatgggcgacagcctgtacatgggcaacgtcccgaggcagcatcccgaggctgagaaacgtcccggagctgagcaacctcccaaaaccttcccattcatgcaatttcgccaaggacaaattcatggtcgatcttgagaagcggcctgcaatgccaatgaactggaacgtgatgaagcagttgcccgtcacaggcactgatggccaggtgacgaatcgctatatgcccggccaaatcatagactggctggattgctcgggccccacagggtttccgctggacggttcgctttcaagatggtcgtgaactgcagttcgaactcgatcaactcgcagagctgctgagttcgtctgccgcactgggtcttaacatcacaggcaagatcttctagattgaagccctcaccgactaggggtcactctagcatatgcacgttgcatacaccacgccatcatttctaaatgccttgaacctccaccttgtttttagatgcattgaacttccacctttttggcattgaaagtaatccacacccggagcacagctctcgagtcatggatatcgatattggaagcttctaaaactttaaacgttgacgccatgcagctgaacaccaaatacctcgcactggtgcagtgaaacacaaaaatccaattgctagctcggactaccgtctacagtgcagtagagaagtaaacgttatatgataagcttggtcgtcttcgtctggcagtccagcgtagggaatcaattctaggtgagatgagaacattgatttcgcgccgttgctggttgtgccaacagtactggtacccggatgagcttcatcgccaattctgtttctggcctcggggcttttattacacgtgagatcgcagcgagcacggcaattcctccaccgatcttaccccacccagtattccgatgtcgacgcatacctcgctctttcactctcgagtttcacctccaccagcccagcagcacgcaacaatgcggatcgggcctggtttcgtgcttcttcctactatcttctacctgctagtttctcagtttgccgccgcaaacgacagcattgactacccactggatacgagggcattttacgctgcaggtggctgtgacacgttggtatctgcagacatggtgagtccacagtataagttgtgcaccactcagacaacgtgctcctcaaacgacacgtccgatgacattcgcgtctgcgtggaggaccgagtccagtacttccaggatgaattcggcgcatctccctacttgctggccgactactacgcagactcgtcctgtcagaagttctggatgtccagggcatttctagcggacggtgagtgtcgtgctcaaggtggaatgagcggagctacggggccatatctggctgtcgtgaccaatgcacaggccaagtccattggagtctacatgtcgtacgacgggtgctacaacttacgcttctactatggcattttcccgctttctacgacgaacttgaactcaggggtctgcgtcaacgacaagaacggatacgtcaagtactacctggtggattcgacatcgccaatgcctacgaactctacagcggagaaagtcgacacgctgtcgattgtgacagtttcctcgcaaggagcttcgctgactcggatggctacttcaccgaagtatttgtatgcaggactcgttctagtcggcttttttttattctaggaacgttggagatgctcgataatgcctatacagcaccagcaaatgtttttgttctgttttcgaattgaggatcattattgtcacttagctatcggctaatgactactaaggcccattctcaaccggaatttttcgtcgcatgcggccgcatgagccgaaatatggacttgtgattggttagtggggtaggtggtcgcatgcggccgcatgcaaaaataggcgctcatgcggcgagttgaccgtgtcgcgagtgccctggatggacgttcaagcgttgtatggaagctagaacggttaggcagtggcacaaagagcgagaaacagagctaaatcaacttgttctctccagtgcagattcacgactgaccctacttccttaccgcgcacggagcctgacagctcgtgcttccttcttctttcggctctctgtcggctcatgtgccgacttcaacacgtcaccggctcacctggctctcgtctcaccccttcgtccttggctcacctcacagctcacgccctgagccacgcggcgctcgtgacctccgtcctgcccttcgcgtcactgctcacccatcgctcgcgtcactgcttccatcgcagccgagcgcgccacctaaccgacgcgtcgccagtcagcgcccctccgaaatggatgactgcccgctcaccgcatcgtccaacagctgatcctccagaattcgatcgctggtcgaacggtcgtccgtgtagtaggaacggtcaccaccgttcctactcgggacatcctccccgactgaaactcgacgtcctcgtcgaacagcttccagcttgtcagctcgcatcttggcacgcagctctcgctgttcggcgcgcaacccgctgagcgtcctcacaggtttcctatcgcctacgcagccgtccgcacgccagaacgcttcgctcaagcgctcagcttgctccagctcttccaagtcttgctgccatttcgagtagcggtcctcggccatcttcaatggcgaactcccgcccgaagtcgcctcataccatttcagcaagtggctggccacgcaggtcgccatcacataacatctccaccgcactaccgtctcgtcgggcacgagcccgtcgccgacgactagacctccatcagccaacatgtagttcagcgtcagcaggagcactgcgacgcccaccgttccttggcacactcgctccacgaagtcgtacacgaacacgaccgtgtagaagagggcgtaagccagcagtgacaggaacgcccagaacccacgacacacacagctcgcacggtcgaccgtccgcctgcactcggccttggaccctttccagtacttggccgtcgacttgcagctgagctccattacgtcaggcaagaagacgcaccacaacgcgtgatacgcttccaaccacttgtgtagcagcctgccgaggccttcggtgtgttctccacgagcctccaacacgatcatgggcgttgcccaaattgcttcgaacgctttccatctccgttccgcagccggtcgacctcgcacggccgggccgttcacaaagcgacggtagcgcctcaggcacacccgcgccagcgtagaccacttgtagacgaaggcgaagactgcgccgagcagtcgacccgcgatactccacagcggcctcgtcaccactccgccaatcgcgcccacgaccaacaaaacggtcacccaccaatatttgcacagcaccgtgagcgcgacgcgccacagcaccaacgaactccaaaagcaccactcgatcacttcaatagtcgtctccatctcgccaccgtgcgaaagataaaatgcagtccttagagctgcatgagtccaccgtccctgcttacttgcgatgtctgcagccgtcgcactcagcactttggtagatccagcaacccaccgttacatttcgtcaattcaccgtgtttgacacgaccgtgtcgctcgtcaaccgcgtctctcccttccccgaaaggaaatcacagaccttcaacttccaacggtcgagtcgttgtccatcagtagctcacgctcattggcttcttgtcctcatttcagctttcgctgagacaagagcaagacgcccaagaaccccaccaccatggccaagcctcgtgacgagaataagaccgccatcatccgacgactgcgctcgcgcttggaccgcaagacgctcggcgccagcgccgaggccgacgcgcgactgcgcgcgcaagtcgacttctacgcccggctgcgcagctccatcttcgtcaacggcgactcgcttggcgtcacggccttcgacgatgtggccgtggccgtgctggccgacgacacgctgttgcccgcggagctcgcgcgcacggtggtgctgttgccagcgcccaccacgatggacacggagcccgcgcccgcgcacgacctcttcgctgctcaagctgttcctgcgcccgcgaccaagcgtccggccgcttcgagctctgatgaccagaaggcccccgccgccaagaagcagcgcaagagctcgcgcaccccgcagtgcatgttcgacttgccggatacctgcccccgcgacgttcagcgatacgtcgagaagctggtcaaggccgccgccaaccagggcaagaccccgccacgagcagcgtacccctgggccgggcagcacgcctggtacgacccggaagagtttccggagctctacctgatgcactggcgcaactacatgcgccaccgtgacacgttcttcaactgtgcgctgtacgcgccaacggacaactcggacgctcgccgccgcgacaagctcaacgcgaaccaaggccgcctcgtgctggtgagtgcgaacgtctgccgcttcggctggtacggcttcctcgaccgcttcgagaacaccgttcacgacaatctcatgtggctcggaggcaaggccgccaagcgttccgtgtcggccaagggcaaggccagttcggcgacggacctcgtcacgctgtggcgccacgaccgttcccgctacgacagcctgatggctcgcatcctggatccgtgccgcattgacgaagacggttaccagagcatccgtgagctgctggagcagacggaggctttggacccgactcgtcccccgcaccttcgactcagcgacgaagctctggctcgcatcgcgcgcgacgcgggccgcaagcctcccaacccggcctggatcggcaacaagagcagcggcatctggaagacgctgctgacgaacaaccggatccgcgcgctccaggtcaagatcgccaagcagctcaaggagggcacgtacagggtcgtcatggacttgaagccgttccagcgcaaggagcagggcgacaacgactcggactacgccgacgacgacgacacgttcaccgtgcagccgccgtctccgcccgtcgacgaggagctcgaagacgtcgaagacgatgagtccgaggagaagccgtccacgccgagctccacgcaggaagacgagcccgacgaccaagagcaagacgacgccgatcaagataactaagtcgaagacgatgaaggcggccgcagttcggacacccacgacgctcctgatgacgacaaggagaacagctctggcgacgacaagggcgactcgtcggccaagggcaactccaagaagaagagctccaaaactcttcgagcttcaagtagttctccgtgaataagggacgctcctgaccgttcattctttccgtattaccccgtgcgtccctccaattaatctcaataacaacatgcaaaccgttttccactcgttccgttcttgagtcttgtagttcgaccgttcataacatcacttcacgaccgttcctccaaaacacaaacgctcccaccgttgaccgtgctacgccattagcaggtcatcgtccttcacatcttcattggcatcggccagcctcgagcttcgacgcaactggggcagccgcaacttttcctcctggcttgttcaaaagccgccactagggcctcatactcaggcatcaactcggcccgaggcacccaaaacgtttcataattcgcaaccaacaccaggtactccacagaacggtccaccgttcgtttctcacactgctaacaacggcgagtcgacacccgtgaggaccgtgtcccccttgccaacggtcagtcgttccgtgaaactcgacgcgaggaggtcggcctcctccagcggtccttcttcagcctctccttcaccgttttcggcaccgtccggcacgtcatccatgtacggccgtgtccacttgccacgaaacttcttcaaacggttcacattgaccgtgaccaccttgtcaggatgcgacgggatgtcagtccggtacgcattattgcccacttcgcaacaactcggtaagggccgtgccacgcgaacgctagtttcttcgtccgcgcctcccctcgcttcttccggaacagttgatacacgcacaccgggtctccaacctcgtactccagggctacacggtcacctaaccgtttttcatgacgatcttgagccttcaccagttgacgctcgactagatgacgagaatcacgcagcgaacggtacaattcccgtgtgacgagactgaacggggttttacctcaaccggtcatcacctgtctactgacccgcctgaacccgccattctgattggccgagactgaacccggacccggctgtacaccgtgcgacaagctctgagctggaattcggctgtgttccgcggagcgaagtgcgctcaagcctaggatgggccttcaggcctggaagactgcgttcagatgagaaaccctgaacgcactcgatccgtccaggccgcccccgtccttaagcgggttgacacattgaggccgtcgaaaacgcctgtacgaacgtatcgtatatggtgtcccgcctcgcctaggccctgaacgcacatcgaattcgtgtacccggagctcagccaccccagtgaagtcgcgtacatagtgtccagaccgctggccacccggaagaagtcccgccaagtacctcacgacccagtgaagagtcaacctacccttggccgcaaggccttgagtatggtttcagctttgggcgcaaatcgcctttggctgcagaccttggacgcactgcgttcaagcctgctgactctgaaacccggtttcaaggaatgcgggtttaagggaaccttggccgcatgcggccaaggtttctcaagagccagtcatgcacaaagacacaggcacattgaatctgggcaagaatccagtgggaagtgtctacgtcaacagttccagtatattcaagtcaagatattcgccagacgcgtggcgaagaacacagaagaacgcagaagaacgttacgagagagatacctttacacaaagcctagcgatagtctagcagataacaatcggagagttcgttttaccccctactgcgcaagtcgtcgaggaatcgggtccgctgtctttaaggacaagcagtgcggagctccccacacacattcaagtccaattacgtggggatcagtctgctccggctgctgaagtgatccacgtattccatttcccagttgggcccattgcgttgaggtaagggtggtgtcccatttcatgttaacgattgatatctcgggtggtttggtagcagtcgcccccgagaatagtctgattgactgcgtttaggatcggattgtatttggtctgtatatttccctcatctgagggtggtgcgcgtgtgaaagtgcgttcaaggttgaccagtaccttgatcgcagattagttgactggtgtacgacccaccgcccaagggtctaagaataagtggcggctgtgtgtttgtgtataactctgtatttgtattggatatctgaaagtggtgtgtatttctggggttctaactcgtggtagtaaccctgatccttcactcacgtttcaagcttcagccatttcggagaagtgcgttcagacaagtgaacgtacgctcaacgaactcaaggctttcaaccccacagacaactcacctggtgatcgatccaggctccccgaagataaacgacaccgatagggattcacaaggtgccacgccaccctggccgcatttattcccagaaccggcgttcaaggaaatctgcgttcagggtttaccttcccaaagaggtttgctcgtcaaccctttctgggctaccgctatacgcctaggcgtaaaaggtttcaccgacctcgatacagagccacttcgttgctcttcaatttcttccccaggttcaggaacgcgacgtccagcggtagcgtagcatcacgtccgtagagagaaaagaacggtgtatcgcctaacgcctcatgataagacgtgcggtaggcaaacaacacacgaggcaaatacaggtcccagtccgtttgcgcttcactcacgtgcatcttgagcgttcccatgagcgttccgttgaaccgttccacgagaccttgagtctgcgggtgataggcagaaccgaacagcttcttgatcccgagcgtttgatagaaagacttagcgatttcggacgtgaaatttcgaccgttgtcactcaacaaccgtgaaggcacaccgtgccgggacacaacaccgttcaccatgacgtcaacgaacgtgacggagtccaatcggagaactgcgaaggcttcggcccatctcgtgaagtagtccacgaatacaagaatgtacttgttgcctcgttcagtctccggtaacggtccgacggcatcgaccactagtagtgagaacggtcccgtgagattggctacgggcatccgttgcatctgccccgcttgccacggtctcgagcccttcccactaccacaacggtagcactcccggacgtactccgtgacatccttccgccatcccggccagaacgcatgcctcctcaccttttccagagtcttcgtcattccaagtgagatgacagaacgtcagagtgatagcagtgcaacacggtctccatatacggtaacggaaccaccggaacggtcgaggaccgtgcaggtccgactcgagctggaagattcacacgccgcatcaataaaccgttccgtacttcatatcgacgtcccatcttgacaccagtcgctcgcaggaaggggtcgagaggcaaggcaccgtccagcaggaaagccaccagagtcttgatccacggcacctcttgctgcgcttctacgaactgttcagagtcgagtccgaaccggtccacaggggatatcggcacatccgttaccggaccgctgccaacgtcctcattcggacggtcaggttcgtcatcatccacatgtccatctgcacgctcgccagcaacatcctcaccgttcgcgagttcaccgtttgtaccaggctgctccccgactgaagccggatgcacgtcatcgaccgtgctctcaggattcaggaggtcgctcatcgtcagagccgccgccgtgtccatcgtcaatcgtgacagaccgtcaacatgacccaaagaagtaccaggcttgtgatgaactttgaactggaggctcgagagctctatcgcccaccgtgcaagcttagcgttcgtcgtacggttaccggggctgaacacccacgtcagcgcctggtggtccttgtacaaatcgaactcacgtttgtccaggtagcagcggaacttcctcgttgcccaaacaactccccaacattcaatctccgagatgtcatcttggttgttgatccagttcttctgcgacccagccaacagcttactagcgtaggccactacacggtcgcgaccgttcacttcttgcatcaagcaagcgccaacagcgtaccgtgacgagtccacgtacaacttaaaccgtttcttgccattaggatagactagtatcggcggcttcaagagtgcacgcttcaactgtctaaacgcagcttcacagtcctcgttccacacgaacggtgcgtccttcaccttcagccgttccaggggcgcagagatagacgcataccccgggatgtagcgacggaagtaacttgtcagacccaggaaagagtggatcccatgcacatccactggacgcttcacgttcatcacgcccttcaccttctcgggattaggcaggatcccagtaggagtcacgatgtgccccaggaacgctacttgactgcgcccccagtgacacttcttcatcttgagcttgaatccagcctgctggaaccgagtcagcacttggcgcacacggaccagatgggaagggaagtccttgctgaaaatgcaacagtcatcgagataaaccaaacagattcgccacttgaggttcaccaaaacggtctccatcaaccgttcaaacgctgggacagcgttgcaaaggcaaaacggcatcactaaccattcgtacagaccgtatttgcacgtgaaagcggtcttagacacgctgtccgggtgcatcggcacgttccagtagccagaagcgatatcaatcgtcgaaaacagttgagcgtcgcccaacacgtccagaatatcatcaatcaacggcatggggtaacagtccttcaccgttaccgcgttcaacttacggtagtcgatgcagaaccgtattccaccgcccggtttccgaatcatcaggaccgggctcgcccacggactgtttgagagtcgaattaggttcagctccaagtactgctggatctccgcttccatgacttcactttcagccaacgagacacggtacggctgctgcttgatcggagcactgtcaccggtgtcggtctcgaattgcaacagatccgtccgtccgggcttcttagaagagtccacaaacatgctgcggaaaccgttcagttcttcttggaacagttccttctggtccgccgacagtttagactccgataaatcggccttcatagcttccgctttgtcgggcgggatgtccggcttcgtagcgttcaccttctcaccgacgcccacttcgcgcgcctcagacacagacgctacacgctcctccttgagctcatcaccttcggcgggcaccgctcccttcggaccaaccgtttgacgctccgcaccctgcggatcgaccgttggcggctcgaaagccgactccgggatcacggaagtgcacgcaatgaccgttcatttccggatccagtactcatccgtagacgcattgcaaacttcgacgatgacctggcttcctcgaccgtgcacagcgaccgtgccacacacagcgtcggaggcagatctaacgacccttcgaccagaacggtcgccttgtcgacgacagcactaacgacccgagtcatcacgagagcttggccacgcggcggcaaccgctccgacgtcgccatcgtcgtcatgtacgactcctgcaccatggtgaaatccagcttcaacacttcgcccgtactcttcagagtcaacgtccgttccgaaacgtctatcacagcgcagaacgctcctagggcatcaacacccaggatcgcatcgacgtggagacggtctgcgaccaacaagctcatagacacttcgaccgttcccagccggagagagagggtaatccaaccacggatccgcaacttgtgccttgaaaagctcctcactaggccttcgtatggttccagcggctcggacgaccgtcctaaacgcttcagcacgcgtcgatcctcgagacttagagtagcgcctgtatccgctagcatttgagacggtaagcagtcaatataacccctcaaagttgctaacagcacacactacccggcgtccgtcctcaacggcgcgatacacgacacactcatctccatcttcatcacagagtccaaatccgttaggcaagttgactgtgacaacttccacgagaccggtccttggtaacggtgtccgagcaggacgctcgcatcgtaccccctcaacgtaatgagaaatgtcctcttcacgctcagggtagaactccacgtttcccagtacttcggcatacggtttgttcaacgacgaaaagacaaagcaacccttcttctcaggctgacggcgacggcggcgcctagcacttggcatcctcgaccgccccgtacggccccacagattcgtccacacttgacccgcgttctcctcgaaatacgacttgatacacggtttcaaccgttcccagcaatctcccttcggaccatactgctccacagcacggttgacgtgctcacgtagccgttcccaatcgggatcaggcaccttgtcacgcaacggaggaacctccaccgttcctccttcacccttcagcacttcatcagtaccgttgtttcggccttcatagtccctcgtctctttcgacgtgcggaacactgcctggcgcgcgatcgctctcttgatcttcggatcgacgcgttgtactccacttaggacagaaatcccttcttccaccgagaccgttcatcccggatcatcggcagggcgcaagccattctcgcacacgaaagactcgacgaccgtgttaaccacgcttgtgaccgtttcattttcagaatccgaccgttcggaggagacatcagagctgcgggtatcattaccgacgcctgaccgctccaaggccttcctcaccgttccacttggcgcggcttgttcaccatagacgacattcgccaccggagtccggaagtctcggttcgcacgcttggcttcctccgacttctccagcatatcaccgtaccaatcttgccagtactcaggcgttccaatgtagtcggaggcagcttggcgcgtccgctccaaggcctccagagagatacccaagaagcgagccagctcttccgcagacggttcggtctgagctttagcgttctgctcgacacgcttcagcaactcgacctcgtccagcggatacaaccggtcttcaagctccttgtcgtactcttctggctcggcggcgacatctgttccagcgagaacagacgtctccagcccgggctcacagtcatccataggatccagttcttcatccgtaaaccaacggtcgtacttcgaggattccttggcctcaaccgttttggtttcgaccgtcctggcctcgaccgtaccgttcactcccttgctctcagcaagaacggtctcttcatccgtccaagccgcgaacaagcagtccgacacatcgtattcttcatctttccatgccaccacctcttctggtggcgtcacttcaacaacggcatttcgttcttcacgtgtcaccgtaggaggttccgacacggtgcaatcctcagacagccccgtgaccgttgtctccccaccgttcccaacctcatcacaccgttctggactcgcagcgaccagatcttcgtagaccacttcgacttccttggcttcgacgtccgcaaccaatccttctccttcttcatccgtccccacgatcttgaacccgactttctttttcttgtttttcttttcagcacatgaagctccacgcagggtagacaccggttcggtctgcttcctcgatgcattcacacaaacatcaacggtggtcaccgtcccgccttcagcttcacggtcgcgatcaccaccactcgagccatttactagacaagaggaaggagtgactctctcctccccttcctcccgcccccgtcattggttcgaagcggtttgtgcagacctggtcctcagatcctgggccgcaacacggagtgccacaatgcctggacacgcaccaataaggtgaccttcttcctcgcagaacgcgcacttggtaacaccacgaccaccgttccggccgaccgttcccgggccgcgttggtagttgttgggtcccgcttcacactccacagcgatatgaccgtgaacgccgcagttgtggcacgtcatggactggtggcggcgggtctctcgcgagtgacccacgtagccacaccggccacacacaggcgctccctcttgcgtccgactgtcagctcccatacggattcctcggaccggtcgaccgttcccacgaggaccttgaccgttcattccaacgccaggattcgaagtcgtagccgaaacgttgggcatgcggttccgcggcgagcgcggaggctgccagcggttctgcatcatctgctgctgccactgctgttgctgtgtcatgaacgtcgtcatcttctccgcaagcacgcccacagccgccatcggatcgttcgcgggtgaggcatcgctcccgctcgacttcttcgtctcgtccgagagctcgtcgtcttcttcaatgggacgtgacatctccttggccaatagccattcgcaggcctccggaatgtcgcgcgccggtcccgagtcgagacatgccaatatgcgcttgtttcggagtccgcgacgggacagctgatatctcatcttcctgttcggatagtctaacgagtcacagaggtccgtcacacggtcaccccactcctcaacggattcgccacgctcacggtgagcggactgcaaccgttcccagagctggtcagccgttcggctgaggaacaggttgtggaatcggacctacagagtcgcgaacggcttgatagtcgagatgttccaccaccgttcagcttcagagcccttgatccgttgtcggaacactaacagccgagactgatccgggaggtggctggtgtgagctttgaacagctcccagaagtcacgcgcgttgtccatgctggccgtgtccgagtagaaagcaggtaggaccttgatcgcattggagaccatagacgacaaatcacggtcgttccgaacggtcgggttgttgaagggggcacggtagccaccgttccgagcttgggtaggcatcggccgtccgttcgttgaggcactcaccgcagttctgacaggtgctttgtagtgcacgactgtcttcaccggtcccgtcgagtgggtcttcaccggtctcgtaggttgggacttcgctgtaggctccactttcaccttccgtcccatcttcaccgtgggcttcggcaccgttccccagccgccgtagcctccttgctgggcaccgacgctccagccaaatacaggacctccaggcagacgcttctcggttccagtgtacatcgggatgaagccactcggggtcctctgctgctgcacttcttcaggttcttccttcacgtagtccgtgtagtaggacggttcgtactcagcgagttcactgtagccatagccttccgccgaccagtactgttccgtgtcatcaaattcggcatcctcaccgtcttcctcgaccgtttgcacagcctcgggacccggcgacggagccattttcatctcgagcttttgttctgcttgagcgaccgcatcaccgtgttcatctgcggtcttctgttcatcatcgtcttcatcggcccaaagagcctccctcgtttcctggcgaagcgagtcacgaccggcagcagtagctacctgcgccgtcgcgtcctctccgctcgcatctctggacgatcgcgggcgtcgctgccccagtagagccgacgtggtcccaccgtgttgcagccgtcgcaaccgtcccgctgccaaccgtgccacttcatcttgtacggacagctgatccccattctctacttgctctccaacaaccgtcatcttcttcagaaagtcttcttcactcgaccttcagcacgcgatcttcttcactcgaacgcgcgaaacaaactccaatctccaaacttcaaacttcaaacttccagacttctaactacttcaggctccgagcgagccgaccagaattaccggcggaaccgagcgttccgttcaccgttgacttgaccttgaccttgaccgttaagggctccgagcgagccgaccgtttccttcttgaccttgttgaccttgaccagtgcggtactacgcgtaccgttctccaatcccacagcggcgccgagcgcaccgatcacacgacacaattccagatccagaccgttcatgcgtccgaggcgaagactgggactccaggcagactcctgaagaccagacgaagctccaccgacgcgaggacttgacccgaactgccgtcgttcagacttcacaacgaagaccgtaccctgcttctccaccacgtgtcgcgagtgccctggatggggcggtcaagcgttgtatggaagctagaacggttaggcagcggcacaaagagcgagaaacagagctaatatgcaaaagcaatcaacttgttctctccagtgcagattcacgactgaccctacttccttaccgcgcacggagcctgacagctcgtacttccttcttcttcggctctctgtcggctcacgtgccgacttcaacacgtcaccggctcacctggctctcgtctcaccccttcgtccttggctcacctcacagctcacgtcctgagccacgcggtgctcgtgacctccgtcctgcccttcgcgtcactgctcacccatcgctcgcgtcactgcttccatcgcagccgagcgcgccacctaaccgacgcgtcgccagtcagcgccccttcgaaatggatgactgcccgctcaccgcatcgtccaacagctgatcctccagaagtcgatcgctggtcgaacggtcgtccgtgtagtaggaacggtggtgaccgttcctactcgggacaaccgcatgcggcgatttcgccgcatgaggatgagttggggtcgcacgccgcaccaccaatcagagcgctcccagtgactcgccagctggcatcgcataacagttttggacaatgaagttgtacattacgatgtcaaactagccattctgatggagtaatatagcatctacgcgacgtgatcgagccgctggcgctagcaataaaggggcctgctacactatccgaactacatgtgtatgggtccgtgcagtgcatcagacaaatgcagacattctgccgcagaacgtgtacatgtactttgaactattatacatcttccggtgaaaatgcttagtgtaaaaagctgtaaactatctttggtgttggcctcctatgtcctggtcagcgttcgctttgtctgcctgttcctcagagagcgtagatgtgacggggcacacagcacttcttaacagaggaagcaggagtatacaaactccaagtgaacagccgttcacgtgtccctggtctgaaggggacgacttgacttgaaaagcggtagatctaagactgaatgtatttataggttggtacagatttggcctgcatacaaatcctaagttccctatagtttgtgtcatacaaaatgtatctgttggctctgaggccaattgggtcactatccaggggagtgaccgatgtagccatcccggaatagtgacagggtgactattccatgtaactccgttacatcctcccccacttagattcgatcttatcgaccaatcagagcgaggttacaccggcgactcacatttcactcgcaaagtcgaaatccattgacaacggcgcgagctctggcgcctcggctcccgggcctcacagagcaactggcgcatcgccgagcaagccgcagggtctccacgtcgactggaagcatgcctccaaagcgcagtgcgcgcagtgcgaaagcacctccgaaaccgcgggccatagggccgaagaccagggcggccaaggccaaggacgagtcgtccgcgctgatggaggctacgaaggcagcggaggaggtggtgcgctctcgtagcagcacgccggagagtggccgtcaggccggggctcggagcaagtctcctgacgccgcgcaaggcaaggaggagagtcctcggggccataaaagcccggctcgcgactgggaagccgtcgtctttgactgcacgatggtccagtactccggtgagagttcacccgacgacgagaacgtctcggagggcagcacgcacgctgccgaaggcacggagctggcggcaggcgacatgaccaacgcctcggccgacgcaaaggcctcgtcagagaaggaggcggaggacgccgagtccggctcaggcgacagcaagcagtcgcacgacgaagtcgccatggccgaccctggggtcgtggccgagaagtggccgagcgacgcggggtccaagccaaggcggtgctggcatccaagcatctgacgctggcacaaggtcgtgagcgtgcccaagcgtcgaaagcggctgccgctgcgaaggccgccgaggccaaggcgaagaagcgttcagcttccaggtcgccttgcggctccagctccaagctgttcatcgacccggagcgtgaggacgagcagggtgccgtccacgagcccaaggagctctccaacaacctcgacgagcagcagcagcaataccacgctgctagctcgggtgcgtatgccaggcagccgactgccacgactgccatcgagtcttcttcaggcggggatgccacgtacccgcagggctacttccctcccgagcctggcactggtgcgccagcgctgttggagaagctctcggctcctcgtggccttatcggcgggtacacctcgaggggttcctatgagcgtgatcttgttgagaaagagccactctttcttggcgacgttgatgtcgcccggtgtgtgctactagcaccacacaagctcacactgaaggagttcaccacgcttcgcaagaagccggaggacaagggtggactccatcctgtgtggggtttccaccgggtcaagccgaatgacaacatgacctggagcgaggtggaagacctctgctggcgctacgtccagcgcaaagggtattccgaccaagagttcaaagaactccgtgaggatcgcactctgtccgcaatcctggacgtgcgcgagctccgcatcgagttcgctcaactcgtgagcaagcgcaagctccactcgaagatggacgacttgaagcaagaggcgagagccaaagctcgtgaagagcgtgggcgtggtgcgactacgtctgctaccgtgccccgggtaccggccaagaagccaaggactacttacgaagctgccgctgcttctcgtcccatatcgcaacagccttcgggcagtctgcctgaagctgctcaacgggctcccacgagttatccgactcagggtaacccctccacttcacgagcagctggcgcttgccatggagccgccgctcccggacgactcgttccacgtggtagtggatctgtggtgtagtaccccgcggaagaagtgggcgcgctgggcgccggaggaagaaggcgccgggacgcgagtgatggacttcgacgcggctgatggaacgcgacgcggattgatgggcgcgacgcagggccgagctcgacgggaaagtcggcgtgggtgatgggccgtgagacacggtgccagaatccagtgcgacgcgtaatcatccgacgggtcgaccagcgcacccggttctgcaaaacgcgccgaccctaacccccgccgaccaaaacgcgccgaggtaagatcttgattgcgccacgcaaaccaggttgaaggacggcagcgcaagcacgacagaagtagggataggcccagagcggtaggcttagcaagcagtagtacagagtagcccgtagcaaggacatagaatagggtaaggactccgtcccgaaatttctctgaaccacaaagacctcccgtcttctccgaggttccaggggaactaccaagcgccggcaagtagagccgcctagatatcgcggccccccgtcgtttgctggttcgggtgctcaccccccacagacccgtgctggaacaaaggcacgttgaacgtataccgtttaggtgggcgcccgataacgcgctgcctaggcgaaggaccgcactggcctgataaccgccgtgcacaagacccccgtgtaggcccgataacgccacacaagccccaggaaatgccggcccgataacgccgcacgctcaaggctcgacgccctacgacaaggaacaagcgtcaacacaagaacccccaactccgaagcctgcgaagacttgggcctgtatttcgaagatacgctactccaacaaccgggaataatttgctcggcgcgaccgctatccagacgcgccgagtttgtgcgagatcgcattcgcgagatttctgcgagagcgctactccacagatctgccaattgcgatcaaggagggccggcggtggcctcgcacggccatggctacgagcctgaggcgacgcagccgtatactggggccccgagtcaggtggtggccctgcagcaagaggagattcgtcttctccgggaccgtgtgtacgtcctcgagatcgcgcttggcgtcggccttggtggcgaggctgccgctcgtgctggtcagtctggtgccgtggagcggctccgtgaggatgttgcctcgctctatcaagaaactcgcagtctccatggccgtgtggatcgtcgagccgacctgtcgtcttacgactcgctgcgtaaccagctcgctggccttcgggccgagcttcatggccacgcgccgtatccggagcagcagcagctccactcgtatcaagcccagtttggccagggctcgtacgacgcccctgcgtatgctgctccgatgtacgccgcgccgtcttacgaccagcgcgcgtatcaggcgccttaccgccacccgacgccgcgcttcgaggagctgcgctcttctccaccgggccacccaccgcttcctgcggggcagccagagccagagggtcatggtacctcttaagacgacccacgtaaaacgtcgggtgagtcgtcatcgacttgggcaagtctatggtgtacgccgcgccatgccggctgaggaccgtgaagggtccaatgaagcggtgcttcagcttgttgctctcgaccgagctaacagtgtttagcggtacgtttctagtatctaggagaactaaatccccaaccttaaacacgttcatgtttcctcttccatttcggtcagagaaacccttctgtttatcttgggcttgcgccatgatgtctcgcaccctgctgattatgttcagcctgtcttcggcaaacgaggacagttgcttccgcaaggtggctggactcacgtccgagacttgggaggaaaaggttttccgagcctctcccccacttaggaccgaagccccggtactgcctcgtaatgtgagcggcacctgagggtggcgcaacgcgtccaggtaaaagggcgtaaagcccgtcgatgcatgtaccgcactgttgagtgcgaactcaaccatgggcaagcgatcagcccaagagcggggcatctccgcgcagatactgcggagcgtgtcttcgagcacgcgattgacgcgctccgtctggccatccgtctgcgggtggtccgccgttgacatcgacagtcgtgtgccgagaagctgaaacaacgtctgccagaacgtagcggtgaaccgcgggtctcgatcagagacaatggtctcgggcagaccgtggtgtcggaagacacagtccatgaacaggcgagcgacctcgtcgccagtgacggtgtcacgaactggagcaaagtggaccatcttgctcagacggcacacgaaggcaacaacaccagtgttgccacggtcatcggccggaagtccgaagacaaagtcgagactcatcgacttccagcagtccgctgggaccggcaggctctgcaatggtgccgaggcgtgaccggcaggcttcacacgctggcacgtctcgcacgtacggacgtaggtggcgacccacttgtacatgtgacgccaccaaaacatctgcgagacagacgcgtacgtcttctcacggccgagatggccactggatggagcgtcgtgcgcctccatcaggatgtcgtacttaagatcctcgtcgttgggcgcgacagtacggggaggatcctccggctcgaccctatagtggagcaaaccgtcagcccactcatagcggtgcagccttgcacgttgtcggggcgtgagccactcggccttggcttccgagccagcggccaagaaccgcacaagaggtccgagactggcatcgtctcggtaccccagcctgatgcgatcatacagatggcgacgctcccagcgccagtcgacatccttcttcaggagatccgacaagggccgtgccagctcggcgtagcctgcactatacttgtgcaggtagttggcgaggcccaaccactgtcgtaggtccttctgcgaccgacgtggcggccaagccgcgatggttttcaccttctccgggtccgcccggaccccggcgctgctgatgaagcagcccaggaccttgatctcctcagctgcgaacacacacttgtcgatgttggcgtacagcttgttcgcccgcatgacttcgaacacacgtcgaaggtgctggagatgcacctccatggccgtctggcctgcctcggcacggctgtggacgaagatgccgtcaaagtacgtctgtgtgaacgcacgcaaaggtcggaacagttgtgtgaccaagcgattgaacgtcgccggggcgttagaaagcccctgaggcatgaccagccactcccagagcataccgctcggcgtgctcacagccgtgagtgggatgtcgctctggcgcatcaggatctggtagtatccgtccaccaggtccagcgcgctatacagcgtgcagccggccatgttgttgagcaacacgtccttgcgcgggatcggtgtctgcgcaggcactgtcgcgctgttcagcttgtaataagcatgaaccagacgtcactttccgttcggtttgcgaacacagaaggtaggcgtcgagtgcggggacttcgactcccgcatcatgcctgccttcgccatggcggcaaagaaggcatcaatgacttcacactgctcccggggaagaggccattgcctcgtgacacagtacttcgtgcccggcacgagatcgatctcgtgcctgattcccctgtccggagggagattggacggtggatccttggacaccacgtcctcgaactccttcaccaaggggtacaccgggtcccgggggttcttaagaatctcagagcccatgcgcgacgcgcgctgtctctggaactcctccaggactgcctggtccatgaccgaggacgagttcaactcggccgacgtggactccggtcggaggagaaccaactctgcgatctccccggcctttagctcggccaagaagtcctccatggcgagctcctcaagggtcagcaactctgcaacctcgggcagagctgtaagctcgacagctcctgtcttgacccgacgaccggtcacgccgtcgaagatgtgataacactcttcggcggctggagccttggctggaagctcggagtcgctggcgactggcgtcgtcggccacacgactgggcccggcttacgacgtgaccctcgggtgtcttcgtctcgtggcgccgcctcgacggcaccaccgatcttctcgatctcgtgcggaacgacgttacccgccttgtccatgagcggaacttggttacccgccttgctgggtggaactatgttacgtgtggaacttggttacccacaccaggagcgcttccagcgactcccgcatcagttatggtctgagtgacctcctgtggaactatgttacccacatcggaagcgcctgcagtgcctttctcatcagttacggtctgagtgacctcgcgtggaacttggttacccacgccaacgccagcggcgccttctccagcagcccttgctgcctgcggtacttcgttacccgcgtgtggacctacgttacgcacctggtaggtgctgtccggcacctccactctcaggccttgtccggcccggtcggagtcgtcgtcagtctcgacggaccccaagaactcattagacgctgctgcgccctggcggccctcgcgggcgccccagctgctgccagaggtgggaacatgactcaccaaagctctgtcagagcgtgggggacggctgccccgatggccttgccgcgccagtcgatccaaggctcgtgtttctccagccacggcatgccaaggatcaggtcgtacttgtccatgtctaggaccaagaacggctccgtgctgtcgaagtcctcgaacttgacagtgaggtccatgtggacccgaggtacttctaccaccgtaccgtcggccagtcttaccgagaccagcccgttgcctttgctgcctcgtagcgcatcggcgtacttgtcgcgattgcgtgcgacagtctggcggcgcgcaaagttcttggacgccccagagtcgatcaagattctcaagggatgatcgtatcccggtacactcgcgtgcaccacatgcagcccaccgctgccctgagagtacagagactctcaggggctaagtccccatggcgtgcgccacccgcacgcccctcatgaagacttagtgtttccccagtagggcgccccgcccctactggtgtccggcgttcccctggttcctggggcgcggcttctgccagcgacccctagagccaaagggcttcgaagagaacttcttcttcagtcctcccgcgggacaagcacgtttcatgtgcccaagcttgccacagccgtagcagcgaatgtcgctctgctcggtcatgcccagatccatgggaaccggcccgttgatcgctccattgccggagttaccattaggcgcaccgccagaggcagggttgctctgccataccgtggcgggggtacgagcctgcttgtggctgtactcctcctggtgggcgatctgaatcgcctcctccatagtgtttgcttgcacacggaacagttgcgtgcgggcaggaccgacacgcagaccgtccatgaacacggtcaccttgatgtgtccaggcagggggttccccaccaaagaggcactgagcactcgcatctcctggatgtactcatgcagctcgcgccttccttgtttgcaggcgaggaagcgcgaacgctggcggtactcgtagttcgccggaagaaacgcggcccgcagctgctcgcacagctgggaccatgatgcgaagcatccaggcgtcgtcgcttcgcgcgtatacgcccaactcttagcgcgaccactagggttggaaagcgcaaaggcgacacggagttgctcgtccgagacgagagccgcgtccatcgcgagctcaacctctcgaacccagaagtgaaggttttctccttccttcccttcgaaggggtgaaccttcagccgcaggggtttcggttgcaccggcttcggtgcggccgcagtgtcctgcagcccttgaacgtgggcgatgagccctcgctcgtaggtgtcgaacgcgttgatacgctcaacctgctcagccggcgtcgccgccgctaagctacgcagggcatctgtcccaaagatgcctgccatcttacgaacggactcgtactgcgagtcgttcagatggggaaactccgtacgatccatcttggctcacttgatgagaccacagaggattcaggtagtccaatctacccgcgtaggcgtaggattgactacaagtgctaccaagtgtgacggggcacacagcacttcttaacagaggaagcaggagtatacaaactccaagtgaacaaccgttcacgtgtccctggtctgaaggggacgacttgacttgaaaagcggtagatctaagactgaatgtatttataggttggtacagatttggcctgcatacaaatcctaagttccctatagtttgtgtcatacaaaatgtatctgttggctctgaggccaattgggtcactatccaggggagtgaccgatgtagccatcccggaatagtgacagggtgactattccgcactagagtatcatggcttaataacgaaagctatcagcgcaaaacatagtcatagcatacactagattgacggagaaccgtgtgcgtgagatatactggtaatgtaggcgtataccgtgcgattaagactagctagctccaagtacttctaccgacgacggttaatagcacgttcatacagagctaccgatgagcaaaacattcggtcgcattataatagctgccgagacgactgttgctatgcatttgaggcctcaccacttgattcccaaggccaaccatgatttgggtgctcaagcgagctaacgcgtacattccggccagcccgagatcgtcgaagacgtgctgtagtgaaagatacgactaggcggggtcggtagagcatttgctaagtccacagaggtcaagcattgagataaaatcttaaatacaatgtgcgtatgttgaaaaacttgtagtgcttccacatattgtgtacaacctcagcaaaaacctggtacagctaactgcgagatgggtgatacggaagatatacgcatgatagtgcagcctgtaccgaaggtataaggaaaagacgtttgaagtgatgtggtggagctactcaatgagtggaccgccaaattatgccacattggttacttgatccccgcccctataatgaagaatttaagtgcttcgtttgttgctgcgcaaagggaaatagttcctttgatgtagagcaggtatattttccgatcggtggtcgctttagaaaagttttattactttccgtttcaatttgttttgtaagtttggcttgtggtgttgatggtggtgttactctgcctatttagcagcgatccactacatgcgtgcaatactgttcatatattggtttgagttgttgtatgcgctagcgcagagaaaaacgagtcttcgcaagactctccatacttcgcgttgctgcttttggtaaaatgctgagttggaagtggccgatgccatccggaatctaagcgggtagggtgtacatggggccgcacgggcattctcaaccgatgcgaccgcacggtacaaaactgtgcgatgcggtgcgaccgcatgcggccggttgagaatgggcctaaagaccgggccctcagatgccaacctcgtcatctgaagagtggggctcctatacttcgtatcgcctcaatcgcgtccgctttactcagcgtctgcctcaggctcttgcgcccctacatgaaaatatgcatctaaaagacgagatgcatccgcccatggggaaaccaggtttggtcggtctgaatgaaaaacttgtcggctcctgcaatcatccatggcgatattcgccaatcggtccgcagccttgttgaatgccctcaagcggtggttccacctgcggacatgtactcgatctgctatgcccctgcatttagcatagatattgcgtagatgcggagccctcggaggccgccgtcgtctcatttgtgccaggatcgttgcgctaaacagcaaatgtaaactaagcctaggatacaaagtttttttgctgttcggctccacgtcttgacaaggaatcacggatctcgagttgagcctggccatatctctgggatgcgggtgccataaacttgagtcgaccttcaaccttcctcacgaagcacaggcggtgaaaactatagattgttcggcgtcactaaaatgtattaccgcttgcaaatactttgccctctaaaatagaccatgcctgtctcttaatatgagtggacacgagataggcgagggatgatttagctttatgcttttggtgggggccgcttttaggcctagaaactcggtttggcccgtctagaatggcatttctgcgtttccaagccgcagaaaagcgttttggtcgggaaaacagagccccaagcttgcatgttagaccagtactggtgatatatataaatcagacctaggtcttaattaagagctggctggattaaaatcgagattattgacgagataataagcatgcgttggccaaaatatctgcaaacagcaatactacttgtgcatttatttaggttagggtaggcggcgtgaaattcttgctcacttggcgtactggttgatgacccagtgcgtttctcgtggagtcagcagcagtgaacgggctcgtaagatatttacggaatgtattgagcgggtcagccgatatcttcagaggtatcgatttacttagcagtatacagtagtaacatttttttcttctcatgttttcttctcatgtagtgtactccctaacgctgacatgttagttgctatacatgttagctaactgttaattagtgtctagtattttgagctaacatgttagtagcgttagagcaaaagtatggagaagagtatatgtttgcaccgaaggcagccgagaagggcgatgtatcaaactgaacacaaatgcaccctcaaaactaagaatttaccatccaatctataagactttgaagaatctggtaacatagggaaacatttgctgggtggagctcacatggggggctggcacaccacttatcagcgcagacgatgaccgattttaagagtgaagacggcttaggtgcctcctacctatgttaaagtccgcggtgcaatatagacacccaggtcagctagtaaatactttcgtacagattactaagtaatctcctcatgtacccatttcctccgctatacagtgtagctaacatgtgtagttttcaactaactgttagtgtccagtagaatcagctaacatgttagtggagtacactattctcatgttacacaaattgatcgcacgcagcatttaccggaactttgtacgaaatatgtgcttcactcatccatgcccacgaagaacgccaggtgcaaggaaccagtagtgcgatcaattcctccgatatgaaagatgaagattggaaggcactgtgcggcgactgaaaaattaacatggtctaaaggacgagaggtcccaatcggtcagccctgacctggtagtaaactggaaaggctcatccagcgaagggtaaaccctcacacaaacattcctggtaagcatacatgtcgtgcttgaaacctacatccgagcagtaacgcaagcaaaagcacgctgtagcaatgagacgaccaggctttttgtaatatatatcgtctgcgtttgacgtagtgacgtgtccagcaggtgatacatctgcagacgttgcctattatacccgaagcttcggtgaacgccagcatacatgtactgtagagagcagaacgatcgtacgagcccaccaatacagtgtactcgttccttggcaacacatgaaagcttcagcatgtcactgttcgcccacgaccgcctgaatgatcatggacccgttcaccgggatcaccaagaatccgaattaaatcctcaatcgtgggcccaccttctccgtctcccagagccccatcacgaactagccaagtgtttcccagccccagacgcacgtcgttctcgagtgtgtttcttatcttctcgcggcaaacccgagcctcaaattctagagtcctgaatgaaaaagccctccatgaagtcaacacggtttgtttgcaaaacatcgtgcagactggccactacgcccgcatgcaccgcatacagtacaatatactaaagcttagcctctccgctatcctttccaaagcgtggctggtcattgtccggccaacgataagaactttcaatgttagggaggaccatgcaaggtgtgcgggcagatacccattctcaagtaccgcggttcttatcctagccttccctcgctgtgtggcaatggactgaaggcgcttgccttcgttttctgcttgaggagcccgagtctcatcgacacctacagtgcaaccaaagtggtgagtcaggccgtcgatcaacatagatccggtcgtagcatccgcatttcgccaactggtatgcggcaccgcacctgcgcgactgcccgcgatgccgttccaagctggatcaatggataggtctcctcgaagttcactgcaagataagctgtgcatgctgcgttgacaatattcatttacaaacactgttgccttcactttccttaaagtcttagcagaaaagacgagctcgacacgcccttgacttggcggttcacagccaacacgaaaacttttggccgtcaagttgacgaccgcgtggcttcggaggctccgaatcatagctcttctctgcacgcccccaatcccttggacgctatccagctgtacatgcaccgggactgtgtcttcctgaaagggacttggaggagccacttcgccttccgccagctcaacgcaacgcacgcaacgcaatgctgatggagctatcgcttgacgaccaggagcattgtcgcgacctcaccacgcaactcctcgaccgaacgctgtacgaatatgaagagcttggcttagactctgtcgcccactccgacctcaactcccgacgctggaagaagctccagtcacatcctgatgtgacgctgtacgctgaccgcagcccaggctccgcctggctctcggtgatgagccgcggcgactgggagcagcccgttgcagtgactacagtcggggagatcaagagctcgctggacgacgtgctcctcgccttggtatcccccaacctagccacgatcaagctgcgaggcgtgttgatgggtcgaaaacccgagacgaacctcaagctgatgtctatcgtgacccccacacaggcatctccgttcgagttccttggggtggcgcagttcgtgaacacgcagcactggccgctgaccatgttcgtggaccctcgagagatggtcctggcgctcgccacgggtgaagtggtgaccgcgagcgggagacgcttcggctacgagatcattttgtccgtcccgctgttcaagaactcgttcatgacgcgcactcaagtcgtcgagacgcgcgtgttctgggagcagcccgacggctccgtggggatgtatagcaagctcatcgtcgacatccgagcgcgactgcccgagtccgtgaagctcgcgatgctgtgtcggggcgtggtgcgcttctggaagttcatcccatgctcggtggagaccaagaagctgcgctggtgtctcaagcgcaggaaggcgctggtgcgcgacatccagcggcaggctcaggtcacggggccggtgaagtgcggcgggtgtgccatcagcacactgaagcttcaagacaagaagaggaacgcgaaccggtgtgaactgtgcgaagcgtggctgtgctccaagtcttcctgtcgatcgacttgtcagatcacggcggtggttcggaacgaatcgaacatctgccagaaggatcttgccgtgtgtccgcgctgtatggtcctcgtgcgagagcagagtgcagcgaatgtagcgcgctcggagttgttgatataggataaggcaggatggtaatttatgctgtgctatggtaaggaactggtaagacgatgaatcttgctgtgtttgacacgggcatacatgtataatattttgcactcgaaagtctcgaaacctcaagtggacaaacaataactttcccgccggggagttgaagttttccaagttgcagtcggtctgattaccactttcctgccaagatcggatcgtcaacacggcaacttcgacaccgccactccagcgaacaacaagttgccaacaacacaagccttctcgatggagctttggactgagacgaaacccctaaagccaacgccaagccggtggtaaggcagctcacacaagcgctgcgctggcaaccgaacactcggcgccgccgcccaacgatgcggctctcaactcccaagatttgccttacaacacgcagcggcaaacgaagcgggacggcatgggtgtggatggacttgttcatctcgcgcctttcatcctcccaagcagaaagtgcgcgacgagttcgtggccacctgcgcggcggcgcaaatttactggcgcggacggaggataagttcacgaccaagcgatccttggcaaagaacaaatctcggcggcggatccccccaacgcgcgagaacgcacttcacgttttccaccgcatccagcaaagagccaagcagcactcgagtcgaaggaggtcgtccaaccaaaaggacacaccacatagggtaatggagctgtccggagacgaccgcagacgctgtcaagacctcacctcgaagctgctggagagggctctgcacgactgcgaggagctggaattgccacacggcggagaccatgcaaagctggaccggaggcgctggaggaagctccagtcctatccagacgtgacaatgtatgcggatcgcaacgccaactcggcgtggctcccgatgatgcggcgcgcggactgggagcaccctgtggctgtgacggcagtggggcagttgaagtgttcgctcgatgacgtgctgctggcgttggtgactccgaacattgcgacccagcggctgcggagcttcatcatggaccggcggccggagaggaactgccagttcgctccgatcgagaagcccacgaaagacgcgcccttccggttcctcgcggtgtcgcggttcgtcaacactcacaactggcccttcaccatgttcgtggggcctcaggagatggtgctcgcagtggccacgggtaaagcggtctcggactcggggagatgttacggctacgagatggtgcagtcggtcacggtgcggtgcaaggacccgcagcgcgcgtcgatgctgagagggcgaatcctccaggctcgactcttctgggaagagcccgatggatccgtcggagtgtacaacaaactcattctggactcgaagaaccgcctggccgactccgtcaagcaggggacgctgtgccgagccgtggtggcgttctggaagttcgtcccgcgctgtatcgagatgaagaagctgcggtggtgtgtgaggaacaagaagagtttgatccgcgagctccagtccgagcctcaagacgccgaggattcgtccagttgtgctggctgtgaagtgccgtcgctcaagttccggagttcatataccagtaagcagtcggtggagaatcagtgcgagttctgcgagcggtggctctgtggcagctccagttgtcgcccgaattgccagctaaagctgattattcgcagcgaatcgggcatgtacgagcagaagctgatgctgtgcccccgttgcatcgcgtgtgtcggcaaccagaacgctgcggatattgctctagctgatctgcaggaagcgcagcagccgtcttatgccagcgcgccgtcctttacaaagacgtcggcagattgggatggagactcgtactcttcaacgtcctattctcctgctaaagcgtcgaattgaatcgagaaataaataaacgaagaatgaattttattttacttactgtatcgcttcgttgatgttcgggttgcccacattgaagtttgagttctgtgatcgccacgacgtgcggggtgctctcttgctcttgctaatatctttgtcttgcgttcaatcatcagtgtgattccatgcagcttgtacaagcaaacaacgtcgactcgatcccgggactcgtgcaaatggtatcgaagacgagtttctaatgcccgtattcatgccgaatgctccggcatttgctcgccccgctcgaaactcatggtaaatagtctgtatactgtaacctggtttaaaaaataagtgatggcacggtatgggcccgctagcgattctcactcaatggcatcctattgaggaacccaccagcctactgtaccacagcgatcacgttggggtgttcaagtgggtggactccacggtggagtccaccgtggagcgagagctcgcccctgcaatagagacccatctgtaatgcgatggggttcgtgacgtgccgagggtgagacctgtttctggtccaccgagctgttttggacggccgaggtccaacggaagtcattaaagcaacactgacaaccaggtccaccagcaccactacaaccgtaatttaccaagcaaaaaaaggtcgctaacattgacgcaatgtaatttttccagacgtgaatttcatgtttggagctactggctcgcatgagctctcatttcagaatctaccgggtaggaagcaagcgcccgcccgcacgctttgcggtcgtgtcgtacgaccgtctgctgcccgcttacctctattctaatgtgtgcatgagcttctgtggtgcctatatacataagtgcactacgtatgcgggagggagcaaacgccttcccagtgcgttgcgttaggtcctaagtccctttgtgtgcgatgcgtgttgaatacaagcgtatgtgcaactttctaaacagtcgatagccgttataatgcgtctttagccaacagcacaacatctaagctaacgttaggttaatgggtgagggcgagcgaacgccagcgcgagcctcgctcggtgcattcaccgatcgccaacacccgccgatcaggcggagtcgggtctacgcaatcgagagtagcgagcgctgcaactcgatatttttctcctagacaacgcgcctggccgagccgaggacttcgcgtaagggggtggggcaggccgcacagcggcgctccccgaccgtagcgagagagggacgggcccccccgtcgcgaagtttgctggcgagagccaacgggcgagtgtcctgccaacgaggaatagactaatgtcctacagtgctacatgtaatatgtaaggtgttgtgatgccccccctcctgctgctgcacgtggacggacgacacggagaccatgacgcgctagccgcgcggcgccgcggagtcgaacagcgcgcagtccaagtgcagcatttgcgtcgccaagcagcggaagctgacagtgcacgtggcggcaatggacatgggcagcttggccggctgtcgcggtgacccgtgtccactattgtaacattagtaaaccaaatattctgctacgagagatactgcaacattgtgtgggcgaaactatcggtaaacatattattggacccttttatagcaggtaaactatttgtgggaaacgatcagtgttgtagtcgggcaacactacgagcctgtccattgatagtgtaggtccgtcgacatggatatcacatgactttcaaccaaaacccaggcagccttaggtcagagctgagcaatgcatttccatgcttgaaatggtactgtagaacatattggtatgggtaagttcctcaattcaacagtcagatgaacacggccatcttgctcttccaagagtctttgctctggccatcgcgacgtcaaaccagttctccaggaagtcttctcatgcgctcgtagatgacacttgtgctaataggcttcgagtccccattgcagtattaatacatgtaaccttggagttgccatgactccaggcgtaacgagcaggcaccaggaggcccgaccgtctttatcaccaaagtttgagaccaaaccaatggagcgccctgaccggtaacactgtcgaccatctcaagttgacaatgcaacttgctgttcctcctcctctttccacgtcaaaattatctactggccggggctggctgcctgcaccgagtcggagctcgagtccttgcgctgaatttcgccagtgctgtcgcttctgcaaaactcctcgccactccagaaacattcgggatcttggacgcgctcatgtatggcggggaggcatgacgtttaaccccagagcttcttctctactcaggagcaaatctcggggatgtgagaccgtcgaatcgagcgagagctgctgcgttttggacctttgaccagttcttctttcccgacgagctgcgcaaggggggagggagggtgaccgtcggtccgagtgagtaagtgagtgcgtcctccgtggaccatcgagtggacctcgacctcctcaagagtggacgttcgttttggacctccaagtctcaagatgctgcagttaacaccgcacgagcaggagtactgtcaggacattaccacgcagctgctggaccggacgctgtacgagtgcgaggagctgggcctggacacggcgccacacgccaatctcgcgccgctggacagcagacgatggaaaaagctccagtcccacccggacgtgacgctgtacgcggaccgcagctccaacggtgcgtggtttccggtcatgcaccgcgaggactgggcgcaccccgtgtcgttggtcgccatcggccagttcaagtactctctggacgacgtgctgctgtctttggtgactccggacatcgccacccaaaggctgaggagcgtgctattagggcgacgtcctgagaacaactgcaagcaccaaaccatcgtgctgcccagtcacgaagctccgttccaggtcctggccgttagtcgatacgttaacacgcagcactggccgcatacgctgctcgcgggtccgcgggagatggtcgtggcgttcggaacgggcgaagtcatgtcctcgaacggcaagcgcatcggctacgaagtcatgcagacagtgtcgctggaccaaacgttccctcgatcgcctgcactgccgcggacgcagatgatcagagcgcgcgtgttctgggaacagcccgacgggactgtgggcatgtacggcaagacgtttgccgatgggatctcccccatcccggactcggtgacgcagaatatgtattgtcgggcggccatgtgcatctggaagttcgtaccgcgcacgctcgaggtcaagaagctgcgctggtgtctcaagaaccggaaggtgatcacccccatgctgcagcgcgcgacgcctgtggctggctgcgctgcgtgtgggatcgtcaaaccaaagagtcaagcggtgaagcttgactctgctgacgccaagaagaaggccaagaaccagtgcgagttctgcgagacgtggctctgtggcacgtcgtactgcaagaccaactgccagctcaagatggtcagctgcagcgagaccaaagtgtatgagcagacgctgctgctgtgtccgcgctgcattaccttcgtacggagcgtgccagcgatcgatatcgctcggttcgagttggcggagaggaaatcgcgcggcggactgcccagctgggagcgagacgtctactctccgtcgccgaccacgtgttcgtccaccgactatgatctctaaccccccccccccccaagaacgagttgtgtttgtataattctctacaaaatgggaagttcacgtcaataaattagtggtgaagccgaatattttttcttctatggagctcgagattttctgcaggaacccgcgtatggtgctgtagttgttgcgttaacttcttgtagccctcgccttgctatctcggtggcacttgtgcctttcactatgttggcacaagtgttgcagagcacgacgctctgcctgtcgatatcgagcgtcctccggtcgattcggaccaattgacgcaccacgcgacaatgagctttcgagcacaaccacgacgagcacagcgcgcagcgataaacctgtgcttaagtggaccctcctgacacgcgatgtataactgcgttgacgatgtcctccagccttcgtcttctgcttttcagcagtggggagccgcatacacagcaagcgaacgaatctgccgaattgcacggcgattgttgtgctgggagattgaactcacggctgtgctcgacgcaatagcagagtttcttggcttccgcgcaacgcggcgccatcgtccagaagtcctggatagaatgccacaatgaagcctggacgacggtatccggcatgaaattcctggaatccacgacaattttgcagtagacgccgacggagccgtccgggagctccctcaacacgcgggcttggagcacctgcttcctcaccgctgagccattcactggccatcgagacatggacacggactgggtgatctcgtacccgaggtgctccccacaggacgtgaagacctctccagtagccgtcacgagcacgtactcctgaggccgattcaagcatccgtggctgattgtatagcgggttacgcccatgaattggaacggttccctctcggaagggaccgttaacgctgcaacttcgacgtcgtcttcgactttctggtccatcagcacagctcgaagcttgaactccgcaggatcagacaccgccaggccgtacaggacgtcttgaagcgagcagcacatccgtccgaccgccacaactgcaacggggtggtgccagctacctcccctcatcgacgacacccacgataagtcagcagctctctctgcgtacatcgacacgttgtcctgagagcgaagcctcatccatccgtcgtgctccacgtcagagcgactgatgctgccacccgaggcccatgacgccgtgtccgcgtagtcgtgcagtgtgcggtcgagcacgttcagcgtgatgtctcgacagtactctctgtcggcaggtgaaagctccaccattcccccacgcgctcttgaccctacgaaaccaggagtgagggccggcgtgacgactgatgacgggtgcaggaccgcgtacgacagcgctagcagcataaacccacgctacggggtaaacttcaaggccgttcacgttcgtatccctctcaagcaatcgatctcgcctcaattgcggcgatacaagtcgtctaatgtctgccttcggtcttcgtaagtaaatatatgtgtatgcgtgcaccaaagtcaagcgtgtcaatttgaagttgttacgttgcttgacagttgcgctaacgttgcacgaaggttgaagttgctgggaaaacttcaacgtggggcgtattttggtttcaaaaagtcagtcaaacccccaaagagagaagatggcgaagatcacgagttttatgcgagttaccaagcagcccaaggcgcatgggaagaaggtggacgcgtcgcctctggtcaagaaggagcacgcgttgaagaacgtcgtcgtggttaagaaggagaaagaggaggagctcagcgaggacgagacgggggtgcacattcccaccttcatctacgaggtggcccatataattgctgccctgaagataaaaattaaggctaaaattatgtgtgttgtgattttttatttatggtctgctgtagacggtcaagtacaaacacaaacaccagaagcacgaggtgtccccggagctcaacgacgttatcctgtacatcaaggtaggagggggttgacgtgcggtattttcgatgatcatttttgacgtttgttgcttgatttattattttgcagcaatactacgacgttccgaaggatttcgagcggaatgccaaggtatagatcatttttttagtggtcctgagcgctattgtattattttttgtaactcattttgctgtttcctgcgaagtttggggcgtatagcgggttgacgtacgggaagcgccttgcgcgggcgtactccatggggcagttgtccctgaagaaagcggtgaaaggtgaagcggctccgcagccgatctgcttgacgtgcgcaaccgttgggcacacttacaagtgctgccccgatgggttttgaagctatgaagctacttagccagctgatattgacctccgacgagctccaatttgcctttatcgaccagtttgccaagaaccaccgagagcccagagatcgttttcgtatctgcataataccaacgaataaataaccagggatagttagtacaggagagttttagtgagggatgtcgatgatcgcatacatggctgagctccacttcgcgcgaatgtcgagagcatattgtgaattcgctggatcgtcagcgagccaaagttggagagcataccgacaatgtagttctccaacaccttaagatcttcttctgcttgtgcatctgatgagactgcagtctcgagctcttccaccatcgagtcgtcattgcagcgcgtgtcttggaaggatgagctagcgaccaactcttttctccccgacgcaaacgatatcaatccatgattcacccacagagacacatgcttcagaagcacgtcgtcggacacctccaacttcgctgcaagatcttccacaccccatcgatctgcacaacaaagtcaaagtcgtgagaggatcacctccacaatgagtttaatgttgcgagagcctgcccacctttttcttcaaagtagaggataatcgtggcttggaatggcgaaacagtaaactcgcgctcttcgccttccaagtcgattgacaactgcaaatataacaaatacgaccaccattatgagttgagagtatcctaccaatgtgagcaaggttctctcacctgtacggagcctagagaagagttccactccagagaacgcgggtttcgcagcacgtggtatgcgtccttgaacgcatcaacatccttcgacactttcgggtgcaacgtgaaatcttcaccttgcagtggcggccaaaactgctgagaaacaatcgtggcatccacgcatgtggactgggctccaccaaggccaggctgattttctactcctcttcccgcccttgcttcagcggcggcggcggcttgtgcagcgggattcgccaagctagagcggacattttgattcagtcgttttgaatcctcgatgtcgcgcaccatgatctcacactgctgcaagctgtcttcaccgaagcgcaacttaagcagctctagcgtttgcacgtcgcgatctgtgtcgaactcgaggttctgcagcaatttatcggctagcatcatccgatattcgttcacgaatagttcacggcttccatagatgttgacctacggaagacgccgttagttggggaatggagactccagctcagcaatttgcatgcaactcacgagaatccttagaatatcgtcactgctgcgactgcgcgaagtcttcgttgggtcagcttcaatggggtctggctcccatgtgtcgggtgaaatgtcctgccacgtccgcaacatatcgtcaggtcactattcattccgtagagtgaataagcttgccgagacatacctcatcatcgtcactgtcgtcgtcgtgctggataatgcgcatattgtcgcgtcgaagctcttcgaataagtcaccgttttgctcgtcggtgagactctggacgatacagcgcacagtgtctttccgttttcttaaatactgtcgaacaatcgcgaaccgggaggttagaactgtgccacacccacactttcgatttcgcgggaagagttcacttacttctttcactggaccgcttaacgcttccagcaaaacacctttcggatctaataaccggaatgcctacagtggtcatgtacaaaaggagcagttcggttaggctcgttgactctgcccccccccccccccgctacagctctccgttgtaccttgatcgtagacacataaatatcaagaatcgcggacgtattcgctcccggctgaagtagccgcgactgcaacgcacctcgaaactctcgtagaagctttccatgctgttgagtgcgctcaaggcatagtctcaagtcttccagcgctgggatactgcacacaacctgagtcagtccaattgcaaccgcgatgctaatctcacacataatactttcgttacctgtccgggaactctttaatgatctcgaagagctgcttgatacgaagactgccaaactcctgcagcacatgcctcgacagcgtctctctccactttctggccaagttctcatccttcgtctgcatgatctcctccagccagggtagcagctccgagcacgcccactcctctagctcagccaggtacagttcatcatacacctctccacacgtggccttcaccaccttcttcacttgagaatgaagtaccctcagcagcgcgggctcggccacatgcagccactgcaactgcagcagcgtctggcggatgggcctcgagtcaaaggcctgcgacttctccttaccccggaacttgtggaagctcatggagaagaagatgaccagcagctcctcgaagcgctcgacggcgcgcgcgtcctcgaacacgaggcagcggaagctggtgcgcagctcctgcaacattgtcgtctcctcctgcttcctcttgagttgcgcgtggtcgtcgaagagactggcgatctgcacgcagtgggcgaacgcgtcctccgcgaactgcagcgccagcgtcagttcctgcgcacacagcagcaccagctgtcggcgcccgcacctggagccaacagcacccgagctcagcgcgtcgaagaagctccagaagggcggcacgacgtccgagcgcagccagtagccgagccgctgcagcagcatctggcgcagcggctcctggcggccgcgcgccacggcgctctgtatcacttcgcacagacgttcggaggcgtcttgagagctggtggacagcgcgccgtcgtctggctggtggtcgaaggcgaagagcttgcgccacagcagctcgcgatccacgcgcaggccggcgctcatgatgcaccttgaacaatgacaataggttcgtatccgctattatagcggatatggaataccgttaggaacattagtagcgttgtatagactgtttatgtgcgtttggaactgacctggttcgtagccggttcttaacggacagccacgtgttcgctcggctcactcgacccgccgatccaacgacgccgtcgcccactttgcattcggcaccgacccaagagctccgctatcgactacagagacacttccacacaatggccgactcgatcatgacgctgctggagcagaacccgaccacgggcatcgccgtcggcggcgcgctggtggccgccgccgtgggcctcaccgcggccaaggcgctgagtggcggcagcaaggcggcgcccgaggccgcggccgcccccaagaagaagaagagcaagagcaaggccaagaagaagacgcccagcgccgcccccgccgacaaggagaactcgtcccccgagatcaacctcgaggagttcgtggacgtacgtgggctacaactcccccttttgatacgacgtgggaggacctcagttgctgatcttttgctgtgttgtactgtattattatttattgcaggacggtccggactcggaggaggaggaggccatccgcgccgagaagcgcaagctcaagctcaagcagaagaagaagaacgccaaggccaagcagcgcgcggccgccagcgccagctcctcgggcaagcccgcggtggacacggacaaggagaaggagaagaagaaggcggccgccgctgccgccaagaaggacgccgaggagggctgggagacggtcgtcaacaagaagaagaccaccaagcccaagcagcagtagacgctccaacaacacacgacatgacgacgcggtctcgaacggcgccggcatacggataggtgacttttttctctctgttctccgtcctcggagaggggagagatggagcgccggcgcgagctggcctgctcctttgtttctcgtacgctaacgagcgagtatggtatagtaagaacaaggcgtggggagtgcggcgacgatatgtcgccgcgatcgcaattgctgagctgagctgacacttttggtcgccatctccacgccttgacaacaaaaaatatacgagattaccaagtattgatcgagtgctgcagtattgtcaacgtgaaggtggtcgggaaggtaaggttgcaaggagttcattactggatcaatcgttaccaagagactggagagcgaaagctgagcgagcattcatctgccgctggcttggtgtagattagcatctctacagcttggactgcggcttgagcgcgttgaagacgaccggcagcttcatggcgagggtcatgttgcccttgagcttgagcttgcccttcatgaaagcctgctgtgcgttgagcttgcccatggcaatggcgacgaagtcggcgtcagcgaccgtgatggtcacgtcagccttcttggtcccctccgtgagcgcgggcgtggcgctcttgaggtccaagttccacttgccagccccagtgatgtcgaactggatgacgcccttgaccttcttggccatcgaggcgccgtccttggccacgacctctccgagcagacggaagatctccttcgagttgaggcccccagcagcggccggagcggctgcagcaggcttggcagcagcagctgcgggcttggctccagcgccctgcttcttcatgtagttgcgcgtggccgccagcaccacgttgagcttcatggcgagccccatgttgcccttgatcttcacgagccccttcatgaacgcctgccaagtagtagttaattagtgatactgagctttaaaggtgagttattagcagtggagagagagacctgctgcgggttgagcttgttgtccatcatcttgaggaagttctcctccgacagagtgatggtcaggtcggccttgtccgcggccgtggcggccttgacgctgcccttgccgttcttgaggtccacgagccacgcgccggcgcccgagatgtcgaacttgatgacgcccttcaccttgctcacgagcgacggacccacctcgtccacggctccgctcatcatggagaacagctcggcggcgcgtggggccatggcgatgtggtggttaagcttggcggcaagtggaggcggattgcgaagtgaagttggagtccggcgtgacggttgacagatctgcataaccggatattacgatatttggtctctatacttttctaaagagtgaagtgagagcttacgttttctactactattcctggtttcctgtttacttagttgcaacaattacgttgttatttttcattgttacaggcatcggaatataaaggctcatgggatgctgttgttgttgttgaacttgttcagcgaccacggccagcgcctcacgcgcgcaattcgaagcgaccagcaatgcccaagcagcagtcttcaagtccaccttcatcgctccctgtatcaacacacttcaacatcccttgccccaaggtggccttcaccttcaaacagcgaaacggattcgtacttagatggaatttgtatccatttgccttattcagagcgtccatgatcggccgagaggttccgctggcggagctggcgcgggcggctgggctgcatgcggccgcctttgagtctccagcgccgctggtgatcgtgtatggcggtgcgtccaccggcaagagcgtgggcgtgtcgcaggcgttgcgcgcgcacccggcgccgcacgcgctcgtggactgcacggcgctctactcggccaaggaattctaccgcgaggcgctggcccagctgcgcgatggagtcgtcagcagcgaggccgaagacaccgcagacggcgtgacgatttccgtcgagtctgcaaatgagggcaacaaacgcgcaatggccgctgaagacgaggacaagttcagctcgctcaacttcttgagcttcttcaaggcgctggacaacttcatggtgcaccacatcgcaatgggcgatgacaggacgaggcgcgtgctgtacctggcattggaccacgtagacaaactgctggatcgaggcctgggagcgttgctgacgtgtgtgtgcaccatcaacgaccagatcgcctacttgaatgtaagtgtctggagcatatttgtatcgggtacgggtggattggttgagtaacgctgctgctgtagatgttcgaggattctccgccgtgggaagcctgtgtgctgttggctacgaggggaatgtcgctggactttgatcgactagtgatgcccttcattcctgcctacgtgcacttcccgccgtacaagccgggtaagtagctgcttttgctgctgttgagctcgttatgtggtgcttattgcagatgggatggtgttgctgcaggacaactggcggatattctggtggagcagttgggcatgaaggaggcgaacgaactgttccgcacgtggctcattcacctgcacgggctgttgccacctgcgccggatggggattggctcgagtttcgcgcggcggtcgtgcatctgctgcccgagttccgggacattttcctgcagcctgtggaaggtgctcaagcctccaggacgaagagtaagatcgagcgggatacgaagtctctggtccaggcgttcttacagactcgacggaggcacctgttcggctaccacaagctcgggagcagcgtcggcgatccgtccgagctgatctcctgcagcaatttgagccggaactgcttgctgctcgtgcttgcaggttatctggcttcgttcaatcctcaagaaacggatgtgcgcttcctctcgtcctctggtggacagcggcgcaagaagcgcgtcaagaaagacactgctggcgagtcgagtacaccctcaagtacaaccacaagcggcaacaagaagcagcagatcagccaactgctcatcgggcctcggatttttacactgcagcggcttctagccatctacctcaacctccgggtcgaagctgaagctgacgacgaatcgtgctcgtccgaaacacgcgaggatgtcttcgctcatgtgagttcgctgtggtctgctaagcttgccttactgcagtacttatcattcgttatctattgtttacagctcgcgacactcgtgcggatgcagctctttcagcgtacaactccgccgcatgtgctggacaacatcaagttccggtgccttgctgacgcgcgcttcgtccaggagacagcacgctacctgtcgttccctttggacgcgtacctcaacagggccacataacgctggtaaattcaaagtatattatacgtaagctcccgtcttctgttgcccaaacgccgtatgcatgcagaaagaagtccacaaaaagaaaacagaaggcgtccccaagctttcttactcgcccgtgcattatcaagagcattgataatgcagctccgtcatagcaatcgcgtggggttaataggctgttgttctcggaagaggtcctccaatacagcgttggcttcccgtaggaatgggtgttccagtgcctcctttggtgttactcgcctgtatgtatccttctccatcatgagagaaatctgtacaaacaaacatcggataatcaccaagttagccttcacgaaatcgcgccatcgtcgataaaactatccgcacgtaccatatccttggcctcatcagagatactcgcccactccggttcttcgaactcataatcaacccgcttgttcatttgaataagctcttcgtcgttcacaccgaagaatggttcatagccgcaaagcattgtatatgccacaacacccgcagagaacatatccactcccatggggtatgcttcacccttaccagctgatagaatttccggagcgacgaacccaggagttccacatctacgaaagcgaatcgaaagattagttagtgtgttgtaacgtgatatccaggcaacctaaacaaacatacctgcccttcagcattccatccttctggatgaatgctgccataccaaagtcagcaaccttgatgaccgcatacctgttcatcaatgaaaaaaaacgaacgttagaatatgagggcgtttgctcgaaaacaataacgctgcttcgtactctttgccatttgcgctccgctcatagtccagtgccagatttgatagtttcacatctcggtgagcgacgccattgcgttggcaataatcaatggcgcggattaggctggcaaccaaaaatgatgcgcgcgattcgtccacagcactcttcgtggcgatctcttcgtggaggtctccatctcgcatcagttccagctccatgaccaagtggttgcgtgtttcgaatagcgactggagccgaatcactggacagtatgaggagcccgagcgtaccgtcagcagactctgcgtcaaaatctcgcgcaccactgtgtcttctcgctctgtttcacgtgcgaccaagtcccagaaaatattcttctcaatgatcttcagagcacaatctcgagtgctggatgggtcgtccaaaccatctttccggcgcgcacgacgaacaattgagaagcgtcctttgcccagctcgaagttcttcggagacgtcccagtcggcgaatccggagtaagatcaaacaaatcgtcaatctgcagcttcacagcgcgtgtcatcgtctcccgccactgcatcgcatccttttcagagtcgaactgcagccacagctcattgcgcgcagagctggccgatgacaggctattgtacttgagtacaaactccaccgtactccgttgctgcgggtggacagatccctcgaacaaattagcgtggccgacaggacggcttgattcattcgtatccagatactcccacaagttattgcgatacaaggacaaaaagcgcctgcaccacttccgtcccggtaccttcacgtggacccaacctgtcagtgccatgccggacgaatcgggacctgtagagaaggaccaatttttatcgccccgctccaagccacgcagttcctcaaacacatcggaagggagctccgtcgccagacatgacagcaaccacgagtccgcattccaagaatgaagattgcctcctgcgttcggcacggcaagctctcccagcatcggcgccagatcttcgttggccatcaggttgtcctccgcaataacgttcatgccaaacggcgacggtcggtccatctgctgcaatgcactactggacggccactgcttcatgttggcgaagttgctgcctcctcgcacgctgacttcgtcgccaaggaacgcgtgcgtgctgttggccatgttgttgttgtgaatcgtcgtgaagcatttgcgcagcaccgtatccacgcccgatccgcctggcgtaggcgacaccgccggtggcatcagcgcgctctccagcagcggacaggcgattgtaatgtggtttccattgcagtttgcgcaattctgcgagttcctccgacggctgttagtccgtggcagtcctgcagggaacaggtttgccggcagcttcgtatcttccatgcttccggccataccaggaggagacgggtggatcacaactggagatatcaccggcgaccgcagctttgcgttctcctcaaacgacaaggagtgcgcgcggtgtcgacctgcagcagccaccgcagcggccacaacggcctggttggatttctctcgcgattcttcgtccgaatcggtcgtgtcgcccaaggaaagcggcggtacgacgtcttcaccgtccgagaggtacgtcgcaatcgagtccgaggcgtccagcgagtcgcgcccatcgatgttgtgcacactgcaaccagcaccaagtgagccattttgcgcaatcgaccgacagttacagtggcggtaaatgatgcggagcccatccctccagccacaaattcaaccacgtttgcgcacttacctgatgtcaagctcgctgtggatgctgttcatcatgagccgctggagcagcatgtccatctgcagctcccagggcttgttgaagatggattctccaggcttctgctgcggagagctggggcctccgctcgaggcctcgttgtccgagctcttcttgaacgacgacttggacgtcgtggacagatccgcgtcctcacaggtcgtggacgccccactgctgctagccacctccctctccgagtgtctgtgatggtgctgcaacatcgaacgacgtgttagattggataattgccatggttgccgctactgcactcacgacgtggatcttgacggccgtgtgcagggccaggttgcccttcttgtggatgagcttgaagcagctgacgcagtagttgtcgtggcagcagccgttacagctgaggctggcgctgtgcagctcgcagtagacgcagagcgcgcgcgggccctcggcggcgacaccgccggtagcggcgtcctcagcgtcgggctcgtcggcgccgtggggcgcgcgactgcgctgcatgaaccagaggcgccagctggcgttctccaggcgcgtggcctcgtccacgaagcgccgcatggtgctgaaggactgccaggacttcttggcggcctgctcgaagccggccacgtcgtccatcatggcgctacggtgcgcgggcggtgcgcgggctagagaagatcgagatctgagcccagcggcggcgagcgaggcatccgatggccggtgggcgggcaggtgggcgagaggcttccttccttccagttgagctcttcctctcctcctttatttgcggtgcctcgcctcgtctggttcagttccttttttcgggcaaaaccctgtggtagatgagtaacccgcttaaatgaatgaagtcttggctaaagctataagcaggtataccatatatggagttggaaatgtggctgtgaacaatagaagaactctcggggaagtggttctggtgctgaagcgagtggaaatcgtgagtattacagtatacaggctgaagcgcgtgtggcaaaaaaggaacaccgaggggtttcttcggtaaatctgaggcgctgagtcagctaaccttagctcgctaattgctgctattttgctgctgcagtcgcaatcgaagcgccatgatcgagcctgcatcgcctgtatcaatcacgagcaggagcagcctggaaattgcgccctaccatcaccgggatgcctactgtacctctgaaatggacgaaatggaatggctacgccacgtcgggcgcgctggacagacaggattggtcggctaaatattctaacgtgtaggtccttatctattgttcctcaaacctccgtcggccttgtgagcccatgtacctctcaaacggtacattattacccccgaccaatcataatacgtcagcaagcaccactcaaaaatgggcaagaagaaggtctccgctgcctcctcctcctctgcgcgcaagcccgccaagggcaagggcaagccgaccggcaattcgtacgcgcgccgggagatcgccgcctgggaggccgacgtggtgccgccggcgctgcgcttcgagcttcagcgccagtcgctgcgcgtgcggcacctgcacgaccagctcatctacgccgtgccgtccttcctgtcgcgcgccgagtgccagcgcgtgcgctccttcgccgaccaggagggattcgagcgcgtcacgcagcgcgcgacgaaggacttcgcgttccgggacaacgaccggctgctgctgcgactgccggcgttcgcggagctgctgtggcagcgcctgcagccgcacgtgcccgccgagtacgagggcatgcacgccgtggggctcaacccggccatccgcttctaccgctacgtggaggggcagaggttcggctgtcacgtggaccagagcgacgtggatcgggttacgggctaccacagccgattcacggtgctggtgtacctcaacgactcgaaggactcgaacttgctgggcggcaacaccatcttctacggcaacgaggctggagccaaggaggaggatgttgtgcttagtgtggcgcccgaaacgggggcggcattggtgcatggacatggagaccgctgtctgctgcatgaaggagcgctcgtgacgagaggagccaagtacttgttacgcaccgacgtcatgtactcgagacttaagaagtaatgtaacgggcgatatggctatactgtacaggttgttcgagcaagtacctacctcattattagctgcgctctcgtcttcggcagcaacatcgagacttggttacgaggcgacatctgactgacctccatccccagtaactgcgatcttccgccgtgcgtacattgtgatcacacccatgtgtgtcagttttcacgctatccaggatatcgtctccctcgaactacagtagacgcctaggcgttctactgtagtaaggaatagagcgcctccaccgctaagaaatatttatacgtagcgcatgattagaaggctcagtgttctgttgtactgctggttaacctatgaaatctgtccacttattgagcaaacaaggctctattgctgtatttattaatttctgttggtgcgtgccatctcccaaatggcaggaccttccactcagccttcaagacctttcgaaagggagatctcacgcccagtcacattgcatgtagtctcgtgacatgactcatgtccatcgaacaacgaccacctcagtcacgttttctaagacagaaatgatgaattcgcttttcgcgtggtttgacggcaagcatatgctgtgtcataacgtggtttaccaattcatgacccgccagcagcacctcatgcgaaatcgtcgatgacgacaccaatattagagcagcgatgctacaacgctagcatttatacaagcgcttaattttgagggtcctcgcaccaatttatgagcaaatatgagcaagcaacagcgaagcaaacaaagcggaaacttatttttttatgacgcactgcgatcccatacaaagtctcataccaaactcaaaccgttgcgctctcgatgatgaacagcggctccactgcaggcacttcggcgccattgttgtcacgcgcttggagtgcagctcctgcaccattgcttatcggaccagacgacgctgcattgcagcgatccatgtcactacatcggcttcacactagggaggcagcaggggggcaggtccgggccgttggcgctcaatagatcgaccttcgatgcgcgcggcgactttgcgctttagtgttgacaacgacactggtgacgggtcggccacggctgcgagcttctctcttctctcctgcgaggacgcggtcgatagcttcttctagctgcttgtctgtgaaggccgccttcatcttacgctcgactcgatatctgatgggatcagcgcaaggaaaagtgagggccaagatctggttaaaaaagccaatcagagcaatattagcccaaataagaagattggataatagtcgctttagtccatgaactggtcagaggtcatgaatcggtaaaccaccttagctgagtataggtagtcagctaatggcaaatcctaagataagcgatgacaaaacgggcatgctcaagtacagtcagtacagtactgttaatagctaactagggctcagcgcgccgctgcgccggcgcttcaccagggttattaggggtttcgacaatggtagggcgttccgctcgcggagctcgctgcgagcagtgcagcgagctccccggtccgatcgcgggcccctcaagttcgtacttaatgtatttttggccaatgaaaattttatcttttcgtgggcgtgacggcggcccgaagaagctaatctgagattttctatatgctcggtctcattgtgtttactagaattgtgcgaccttatccaaaatgaagaaatatatgctcatggtgtaaatgcagcctctgttgaatagctatgtgtggaattctctattccgtcatgtattagcgatatgccctgtacctggagccgtggtccttctgtgtttgttcgtgatttgccagtctgatcaaggacgctattttaatactattaaaatagtattcgcagctcgaagatccgaagaactgtcgctaggcggcgtgtcatcgaacgacattctcacgactttcgagcgacatacatttcaatgccgtgccagcgaggtcttgagtaattttcaatgttctatatgctttgaagtgcacacggggcaatgctgcggctacgaagcagccgcaggagatgccgatagatcgtaaagagaattcttcgaagtcctcctatctcagccttcgttgagtggtagtgctgttagtgtagaatggctgggcgggtgtgtccgtgttgtcggtttaacaggaagaagtgctgtcttgggggagggcgtgcggaactaagagtgccgcccccacagtccaggcggatggaagcttcgcgaagcctccacagccgccctacatctgcatatctattttaacttggtttcactatacctacggtgagtcgtacctacactgacctcctattcgcttacctttctaccaatcagatacactcaccccttctctggctgggcgcccttccgacttgtcattcccgaaaaagacagagaactgcgacgcttccgactgtcgcctgaggaattagtccgacctcgcttctccttcgcctcggcctggttgttggaggcttggattggttccttgggctgatggttgtgtcgctagcggtttctactgctaccggaatgcagtctcctgctttcgcgcgttctgccttgcctccagcgacggctgatcatgatgttgaggctccgccgtctgcgtcgcctttggcgaccgcaaatctcgatggtccgtccatgcttccgcctggcgccgccacgccggccgcgccggcagactctgaatgcgccgccgcgctcgcgcagattgtcgatgttgtggccgctgctggtgaagacagcgatgctgactccggtcttgacgaagagatggtgcgtgtgtgggaagaattagagctcaccagtcgctctcccggtcttggctctccagattcgggctcggcgtccccggcgctgccagcgccgcgtgaggttgttgcttcggctggtggtttttctccacctacgcgcctccaggagttggtcttcatgctcgatgtggaagggttgtctgtcgaggaggcgatagctgctgagcctgcgcttggggcgacctttgaggcctcgcctcaagatgaatccgggcttttcgatgatagtgacgacgatgaaggcctgcctcaggttgaccgcttgcgcttgcgtcgcggtgacgagacttcgacgtggcatccgatgccgcttcctccggcgcccaaaacaccatccgtcgaacaaccgcaagaaccactacgacccgaagaagccttgggattacaacactgaggttaacatcgtccgtgccttggatgtcaggggcaaggctccgcaccgtggctacttggtggaatgggaaggcaatccgctacagctaagctgggtctggatggagcagctcgacaaaccgtcgacgcgctacatgatgaggatggtggacgctcggaaggaatcgggagacaagcgcaccttctgttattggtactcggagcgtgattccgcgtcggaggctggtacttgtttcatggatgctttccgctcggccttgtactatctcggacagccggatctagtcacaatggagatgtgggatgcgtatgaagacacgcgacctgaagccatccagtacggtgtgtctcgcgacgacgtgacggagttcttcaaagttctgcagcgcaagagtgtgccactgaactacgacgtccttcaccgaaacgctcttccagagtcaagtgccaacatcacgacgctccaaggggtttgccgcaaacaagcacccggtgtttacgtcgtcagcgctggccgccatgatgtcgggcactgctttgtcgtggttagccgtggtccggagaagcaacttctggctcttgacaatttcaatgcccgcaagaacccgccggtggacgttcatcctctgagttactagcagtggattcagcacgtgaaatggatggcgcaagtggagctgcaaccaggatacaagtgtcgccacggcaagcgcaagtcgaagacgcagaaaaagcgggagaagcgcatgaagcagcaggttctgcaacaagaggggatgtaatacgggaatacatgtaggcctttgagccccccttcagttgatcctgcttcaccgttttcgacgcttctttcgccgtgcagattcaaattctgcgatgagatctgggacttgcgacaagttctccactggttcccaggtttgtttctcctcgcccacccactccacaagatattggatccgccgttttcgcgttcgctttccacgtaatgccttgacgatctggccaatgctgccgtccgctaagattacgtcgcttggcctcgacaagcgagtcagctccttgtacggcttcaatgacgcagtgttgaagacgggatgcagtttgttgccagcctgtatgttgagctcgtatgcgtggttatgaatcttccgcaccacggtgtacggtccaatccacttgggtccgaacttggtggagttgggcaagccggagtgcttcgggttcagattctgcgtgctcaagtataccctgtcaccaacttcgaagatctgctcaacacggtttcggtcgtagacgtcgcgaatccgttctcgggcctgagctaacgcttcgcgacagcgtaagagaatcgccgcctgtcgctcgtgaaactctgctccgcggcgactcttggggacactctcaagttgctcggatgcaagttgaagtggattcagcggaatgtagcccagatcggcttcgaacggcgcaaggttcgtgctggagttgacagttgagttgacagcgaactcagcgttggcgagatggacgtcccaatcatcttgaagtggaccgacgaagcaccgaagatactcttccaaggttcggttcatgcgctccgtttgtccgtcaccttgagcgcgatgtgcaacggtcatgcttagcttcgtcccgatggacttgaagacatgctgccagaaggcggacacgaacttcctgtcgcggtcggagacgatattcgtcggcatgccgtgtaacttccagatgttgtcgatgaagagtcgagcaacaccttcggcgttcaccttcttggtgattggcacgaaatgacaccgcttggtcaaccgatcgacgacgacccagatagagtcgatgccccgctccgttcgcggcagatcagtgatgaagtccatggagatggatctccaacgctcgtctggaatactgagtggctcgagcaacccaggaggtttcgtcaaccgcggcttgttcctccgacaaggctcgcagtcggcgacaaacttctggatggacttcaacatctttggccagtaccaatggcgcgccagtgtcaagtacgtacgttccgcaccgggatggcctccgtagttggtgtcgtgacactcgctgataattgtctgtcgcaacttcacatcgttgggcacgacaatccgtggagcgtcatctgcaggcgtttgataccacagtaacccgttcgcttcggagtagcagcggtatttcttgtgctgctggtgttcgcgctttggttttgagtcggatttgcgtcgcttgattgctgtcaagattgcttggacatcacgatctttcttgtacgctttcttgatgcgcgtaatcagctccgagtcacccgttacttcgctgatcgcgaggctgaaggatgtgtcgtcgaagctggtcacccgtaagtcgtggaagaacttcgtctccggttgtaagtctgaccttcgacttaacgcgtctgcgatgccattcttcgcaccgggaaggtacgggaacgtcggctggtattccgcaaggatgtcgtaccagcgagcgagtcgacggttggccatcttctgggtgaacagtccttcgagacttttgtgatctgtctcgacgatgggtggtttgtccaggcagtagatccgaaacgctgccagcgcatgaacgatcgctagtagctcctgctgctgagccagatagttgagctctgccgacttcatcttccggcttgtgtacgctatcgggcgctcaactctgtccaccacttgaaaaaggactccaccgacagcaaacttgcttgcctcggtacgcagatgcatggggctgctgaaatccggcaagtgcaatactggcgggttgcacagtcgccgcatcaactccttgaagttcttcagctgctcgtcgctgagatgaatcttggcgttccgcttgttcttcttcttcaagagcgcaaacatggaggctgtcagagatgcgtactctggacagaatcgctggacgtaacctgtcaagccaaggaagctgtgaagctcttcttgcgtccgtggtacaggccagtccttgatggtctgcaccttgtctggatccatccgaactccatttcgccctacgaaatctccgagacacgggatctcgtcggagcagaagacacacttggacagcttgacgtacaacttgttatcacgcaagatgtcaagtgttttccgcagtgcgttcagatggtcctcgatcttcggtgacttggtgaaaacatagattcatcgtagaacgacttcgtgttcttcaagtctcgatagagcttcgatgtcaatctgtgcatcgttgctggcgcgttgcaaactcgcattggaagaacgagatactcccagagaccgttcggcgcttggaatgcggtaaacttgatgtcttcttcccgcatgcgcacttggtagtacgcggacatcaggtccatcgtggagaaccagtacgcaccggacatggcgtcaaggatgtctcccttcctcgtcatcgggatactttgacgcacggtgttcgaattcaagtaccggtagtcgtgaacaattctccagccaactggtttccggacacagaatgttggggctgcgtggggactgatgcttggtcgaatgagcttgtttttcaccatgtcttcgacccagcgcacgatttcacgctgctgctccggcgactgtcgccactgctgccggcacatcgccatatttggatccttcacatcgatccggtgttcgatgtcacgcttctctggtaaaccttcgggtagttctggacgaaacacgttgtccttatactccatgagaagattgaaagctggattctctcggaaggtgtcccagtctgtctccagatagcgttgtgctttcgcactcccaacgttgtcgggctgatctcggcgttgcagtgaacgtgcaacttgcttgatcgtctcgttcgacagcaccaacatgaagtcaggctcgtcgctcgtcttggtcttgattctcaggaacttccgcaacttcttgcgcgtgatgtatttggtctgtacaccactctcgtcgacaactcccatcgtgaacatctccacggcgttgtctccacccctgatactgctgcttccatcagcctcgactgcagtactctcgcgctcagacgtcgcaacgtcgtcgtctccagctaaactcttgccagcttgcgcgtcatcatgtcgtccgcggacaacacttggggatttcttctgcactacgtcaccaacagcttcaatcgtgagcttcacatccgtttccagcgcggcacctcgacaggaatcgggtcttttcgccgacaggtctttcgcctcgacagatctccgaagcccggaggtaatcaccggtccgccttcctcgatcggctcacaggtcttccctgttcgcttccagtgcagagtcctcgttctcgttccttcgattcgtcgacctctccagtcaatacgtggttgcatgtcttcgaagaatggtattccaagaatgcaatcgaattcgtctggaatcgggtagacgactgccacacacttgtaggcgtcgtccagcctcgagaccagaatctctatcagcagaatttcaagctccgcctcgacaatttggttgtctcccagtttgacacgaatgttcttgtcgctgaacttggttgtctgaagccggtgcttctcgacccaacgcttggatacgtagatcgtggtggctccacagtccaacaacatgcttcgtgtcgcgagacacttgtcaccaacactgatttcacctgttacggagaacagtggacgtgccttgtagaccagagggttttcgcacagaacgttcaagttgatattctcaatctttggtgtcccggttacgctctcgcccacgccaggaccctcattcactgacgtggttgctcgtttccctgcttctcttgctccttcttccataggaagcagttggccttgatgtggccaggcttcttgcagtgatagcagatgcggccttcagtacgcttggagtcagacctcggcttgaaccgtcccttgccgcggaaaggtttccctttgaacggcttgtcttgcttgggagcttgatcagcgaagatcttcctcttgtcttggcgggactggcggtcgcgcacgtcgtccacaaagtgcgtaacttcgtacttgatcgccaggtccatagctgcgctcagcgtctctgggttctcgagcttgacgtagctacgggtacgaggcttgagaccgtttgcgtagcttagcacctggtcaagtgcactcatgccctcaactcggaagataagagcagagtactcgccgttgtaggtctcgatgtccgccgtttgcttgagtcgctgcagcttctctcgcaagacggcctggtagttcgaagcttcgaagtgttggagcacatgctcacggaaaatcccccacgtgtgctcctcacttctcgtcgtcgatgaccagtgcagggaccatcctgaggccggcttttccatcgccgacccggcgatacccgcgctcgcgtcttcgatttggattccgttgatgcgacaggcgttctcgatctggaactgccattcgcgaacgtcttccccccgcttgccggtgaacttgggcagattggcgggcactcgcgtgcgctctgccatcgcttgattcagccggtcgatctcggctcgtagctgggcgttcgtcggcatgggcttcttgtagtcaggttgctgggaccaacaagtgctaccagtttaacaggaagaagtgctgtcttgggggagggcgtgcggaactaagagtgccgcccccgcagttcaggcggatggaagcttcgcgaagcctccacagccgccctacatctgcatatctattttaacttggtttcactatacctacggtgagtcgtacctatactgacctcctattcgcttacctttctaccaatcagatacagtcggatcgcctatcggtatattttcacccctgatagctgcgaaccccggaccaccagtccccgaattggcacatctgcacaatcgggattttcctaccgcgtcccacgcgcggacagaacgtctggcgtctgtgccagcaggacttggagtatcaggagtcgctcgtccgtgctggcagttccttcatcttgcaaatattggtcatcgagttcacagcattgtcggcgcagatctgctgccttgaaaaaaccgtagagagaccggggcagcgtcacctactgttccaattcggcgttgtagccaaccacttaagacgggtagtgatttatttttgtgatgagttctcggtatgtggtcctgtagtggtagttgtcaaaatgcaggcgtgagagaaacttctgggtaagtgatcgagcgtgaaatggaaagtgagcgaacaacgaagacatcatagcaaacggtgaagtcatactctttctatcaaaccgattgatgtttagcgctaagaccatgcacccaccccggtaatttatttctctatcgatagattctgatcggttaacgtaaattctcggctcaggtcgctcgaatgcatctttttgaggtgctccacgcaacctgacgccacaggtaacatttattaatatttaaaatatgatcttaatcggggtatgcgacttctgttttcccactgtactcttccttaacttattgtttgtatgaaatcttccagatactgctagatgtcgatgaatcaagttggtcaggtatgggatgagggattaatcagaccagggattccaatcgctccttaactctgaaataaatttcagagaacacggaaactgctataagagatagggaatgccggtgaggtttaactagctgcgggtaactttttgccgactcttgactagttcccttattgaagttgacaaaggggataggaaagttaaactaaccctttaatggggcctctcgcttggagctttcgtcggcgtgctcggcttgaaaggcactacagacacacgcccaactgtcttatcgccaggatggcggtcggtaaatgcgctgagtgagcctcacagtggaatacgccctcttttccggctaagtaggctcacaacttggagcctcgtgaaagttttcagtaaaaatgaattagttcaattatgaaatccttcattgactagtatgatgcttgaatgatcgatacgcagttgcctaagatattccccacctgcacgcacagtgcggcagttccgacgcagctacagccgatggaagggaaaccaaaaagtacagcagccgattatcgtgcactgtgcatgatacccactctgagctgggttgttggagtatatctgcgcgaaacgttggctgatcagcctatgtatgctctttcccacttccgaattcttccgtgacgtgagctcctgtccgctggttgctgtccgtgactatggttgccctgctgttcgccgccatgggtgttgccttctgggtcacggttgaggcttattgtgtaccaatttgaagaagcggccttgtgttgctcgcagagtagaaggctcaagaaacgagtagttacgagcaggcagcaaagactacctgtgaggcagtcggtgttttgtggaatgagctcaaagctcccgttagttcttttctgctctctgtagtccttctttcctaactgccggatgtggtggtcaacctctttcataggacagccccaccacgtgggaaaacctccagcactctgtgccttcacaggataaacgacccacgctcgcactccaacgttgggatcaatacacatcaatcctccacatttgaaatccaactgctcagaactcgagctgctttcgggtgcgtgcgtcgttgcaattcgagaatacaggtaatggcgtgtttacgtttgtcattatgtttgcttgtgcgctacacgattcagtcgagtacagaccgcaagtggcctgctttagaaactctacccgcatagattgttgggtcatgcgcggattggtttgtcacaaggaagaccatcttctgcggcaagctgttcgccgtgtgaaatactacttcaatcgtagaccaagttgtagcttttattactaggctggcatccctgccgtacatccacaacgaaatcatcttcgtgacggtcgatagtgtgctcgccaaagacctcgagaagaacgtggcgctgcgttgcatttgtattagcacaccgattctccactgaaatctctgaagatctcatcgttgcgagaagagcttgaagtaaatggacgtggcggcaatttgaagggagtaagccgtgtagcctagcacacttaagccttaaccccttccttcccaacggttgtaccgtagatcataaggggtgtatagctcctgtcagttttttcgcagcgtctctgttatgttggagggtacaacataagaaaattttaatcttgaaatttgtatgtacgtactgtcactgcatacccataatgaaatcaagataataggttgtgaaaaatggtcatttgcacaggtctaggtgtcgctcagagagattcggttgaagatgatatagattggacttgtcatccacctcgaccccagtggccgccgtccactcaccactcatttcagaaaacaccgcgccgagagcaagatggtcggcgagtcaggcaagacaccacgctacgagcttacagcgcgggagcggcagctctgcctggaagggctgctgagtgaacggcacgcgcgccgtgtccgccgcgcggaggagaaggacgcggaaggaggcggcaagacgaagcgggcgaataaggcaacgaggaagagggctgccaagcacacgacggcggcgatggagacggcactgtccaaggaaacacccggcgctatggcggcagcggtgggcgtgtcgatggctgccgccgaagcgaaggagacggcgcagaacgatgaacccgcgcgtgtcgcggacgagaccaaggagacggcaggcagcgaggaggcgacggcggagcctgtcgtggaggaggtgctgtcagacatactggctgctgttgctgatgcaggcgtcgctgctgccgaacggacccacctcccgttgggaactcgcgcaagctacgccgagcgcttctgcaagaagagagcgcagacgaggatggcgcttcgggtgacgacggcgcttcggacggcgatagcgcttcggacgacgacggcgcatcagatgtcgagagggcttcggctggcggtagcgcatcggtggacatcccgcttgtgcctctgtcgtgtgttgtcgacggtgatgcgaacatgatgtccgcggggccgatgtatgtacgtgcttgaactccgacgaggacatggacctcgaggaggagcccgaagacgaagacgagtggagtgatgacgaggaggaggagtgggagggcgattgggacatcagcgacctcacggacgaggaggaagaagacggaggggggagctgtctgagtctatctgcaactcagtcgctcagagcaagaaggcgatcgccatgatgcggacgcacgggtgggagtatggtaagttatgttgttcatatccaatataattgcatggacgtgttcggtgtatccaacataaaggtgaacataactaacttctgtattgttcgttttagacccagccaagttcggcccagaccccacttacaaggacttgtacgatgggccgtacggacggagtgaccgtgtgatggacgtgggggacgatccgttagcgctactgttctactttatgccgccgaagttgtggacgcagatggccaacgaaagcgacatgtaccacacgcagtcgatttcacagagaccgagggcaattcgttcgcagcagcgacgcgccggcgtgcaagtggaagatttgggcgagcttcggcgtcggcttgcgcgggtgccggagatccagtcatggaaggttctcaccgtgatggggctgcttatcgcacgcatgctgatgcccattcggaaaggtattgcggcgcactggtcgacgaagccagttggggcgctcccttccaaccggttctacctattcatgcccaagaatcggttctttcacgtgatgggttacctccacttctcgaacaacaagtcgccaagggcaagcatcgattgcgcgtggaagattcggccggtggtggacgtgctgcagcgaacctttgctcgtgggtatcgcgtgcccccagtgatcagcttcgatgaagccacactaccttctcgctctcgctacaatccgacgcgtcaattcaacaaggacaagccccacaagtggggcacgatggtgttcgtcgcggcgtgtgctaaaacgtcgtattgtctgaggtatgtgactgaagctgaggaaggttagccttcttcagcttttttttggctgaagtgcttatgttggccccaagtcaacataagtacctttgattcatcgctttggttcaccataagctgacataatcttgctgtactacagaatcgaaatctactgcggagcgaagacccatctacagatgccagcgcccaaagacaacaacaccggtgaagctgcggttctgagaatgaatgcgctttgcccgccctcgacgacgtcaccgtggcgtatagtagtcacggatcgcttctacacgtcggtcaagctagcgctagagctgctgcaccgacgcctgtacttgaccggcaccatccagacggatcgatcgggctatgcaaatggcgttgcgactaagaaggaggtgaagcaagtgaagaagcagaagattgttttgcctccgcaaggaacgatcaagcttgctcaaaacaagcgtttcccgcagattactgcggcaatgtggatcgatcgcaccccagttcacatgctatccagtggcggaagtcgccggacgaccacagtctgtaagtgatgccgttgtattgatcatgttatccgtactgatctaatctgttatctgtattctagtgcggtgcatccgtggctttatgcaatcggtgcctgttccggagttgatccacgattatcatcgatcgatggggggcgtcgatgtccacgaccagctccggttgcagcggtacaatgtgcagctcatctacaagactaggaagtactacaagaccttgttcttgaggctgttcgatatggccctggtgaacgcgtttatagtgtttcgccaccacaagagggtaccgaccagtgaagcactacgcattcttcgaggcgctgatggcccaattgctcgcggtgaacagcaaggaggcattcgatgctatcgcggtacgttatgatggaggtatcaacatacgcggtcttggggtctaaccttatgtatattatgttgacgcattctaacagaacgcgacaacagcgcgtgaacgggcagcggcttctccagtgcgagagggtattccgcaaactcccacagcaactgagccggctgccgacaacagcggcccccgcctcgaaggaaaccgagacacggtggataacgagcaaggtcacaagaagcgccagcgcttgtgcaaggtgtgtgcgttgttcaagatgaaaccgaggaagtacaccaagtacttctgtccggagtgctcgacagggaaccgcaggtacgtgcactcgagacctcctgtcaaccactttatactaacactgctttttacaggaggtacttctgcaacgttgggcggggcagggagaaaacctgtttcactatctggcacaatgactggaacaatggcaacgacattccgcgcagcctgctacgggggcacaagctccgggaccgtccacctgcagcacgccctggcaagaagcgccggcgcacgtctggcgctgagaccggcgaaggcaacgccggctccgacgacagcgtggccgacactgaagtgtgggctagcatggtcgatccgacgacgggttggcgatcgtggaagtgtaggctgtagcaattgcatgttctgactttgcatttattgaaaaagcaatcagttgacgcacaatatccttcgttctcttttgtgatacatccgtgcagcagcacgtgtgcaatgctcagagatagggctatccagataaacagtacagtgcatatgttgccttctccatcataagcgcaccaccactaaggtattgagtcaacgttaggcctgtaatgttggatatgccacgttcttaatctgatacaagtttgaactatccaggcagcatagtcgtgcaaaaaatccagtctatacaaattcctatattatcttatgctataccgtagatcataagggtaaaaatatacccctacattttttccgggaagtaaggggttaagtgagctagttgtggacgcaaacacctaacaaatcgaatttcttttcgactcctctggcccccgtaattagcttgcgagtggctcacatacttgaacgtgaggtagatatctgtctgcacgacaagccaaattacgacaaaccctcgttggtcttttgaccgcctacgttgttaggattattttaatgttaagtaattcaaaatacctcatcatcatcccaagccccaccatgaagttggacttgcgctccggccggaagccgtagatgctttcgatgcagtacgccaccgtcatgttcgtagtcgtgttgccggaagtcaccacgatgatgtcttggttgtcgccgacagggctgccaaaattaaattattgaaccaatgcattgattttaatgactaattctgaggtaaacaattgtctgcgccgttgctgcaagcatttgtgacgtgcttgtggcacatatgttaggtaaatgtattacattttcctgtataacatatgatgatgatgatgaggtatattggataactgacattaatttgaatcctaacaaccctatagccgatattttaccttcagccgctcctctctctagtcggcagcttacgcttcggtgctgtttacttccatagcccactccgcgtagtcccgtcacttgagattatgcgggcgaggcttggtagtcgagtgttggttaggaaggaaatctgaaagtgaattagaatgagttaggccaaactaacgatcatatcctagcctcctatgcttaaacatgaatcgtaccaacgcacacctcctacttccaagtattagaggccggggatcaaaagtaaatgttgcagatcgtatccagaaaggcaacttcaacttgccaatcagaagtgtcaaatcttggggctccgccaatcagatcccagtattccaccacgtgtaccacaattgccaaccatcagcaacaacttcacagcaagcacgtgcctcgatacggagacacacaattagactgcgaagtgtacaatcgcaacacccccactcaattagcggtctacctgagcatctcagtgatgttactgcgctcgagtagatagcttcgagtctttgtcgagtgccccttggtcttgaaatcagcgagctggttcttggactcaacgtagtcgagctccacaacaccactcgtgatcttctcgcgggtgaagtggaagcggatgtcgatggtccgaggtccttgatgcgaaacttgtccgcgatgcctgccttcaccgagtcaatgatggtccgctggcgagatgcaatcagcatgtcatcgacgtagagacacaccacgcactcgtcgtcgccagcacctctcgtgtagacacacgggtcggcatcggcagcccgaaatcccatgctcttgagaagcgcgtcgatcgtcccgttccatacgcgagacgcttgcttgagtccatacaaactctgcagtagcagacagacgacgtcatcttcaccttgagcttcagccaaatccagcagttctcgaagtccttcaggcaacaccatgcagatctcctctgcgagctttccatacaaaaacgcagtgtcgatgtcacgctggtcaatctccattccgtcagcgcagcactccgcgagtttgcacggatagagttcaggtacaccaccggtgagtaggtctcctcgtagtcgatcccatgtcgctgcgagtatcccttggcaacgagacgagccttgtaccgaacgactctccccgtctcatcgcacttcaacgcgaacacccagcgacagccaatcgcgcgctggtatttgggcttgggcaccaagttccatgtcttgttggtcatcagcgacttgagctcacttgcaatcgctgccttccattgggcacgaccctcactcgtaatcgcctcttgatacgaccttggcaccacctcggttgcagccatcagcattcctccgtggatggcaagctggttgtcatccgacttggcgcgaccttggtccaccttctgatgcttcgtcctgatctcggacagcgcaacgacttgtttcttgcgagctccgggctcctcaggatcgttggtttcttcaatgtgacgagcacgcgaccgagtaatcatcggatgggtagtgtacggaacgattgctccacctgtcgtcacgtcattcggtgacatagtcgggccgccaacttcagcttcagtcgaaacgtcgcgaacaggcaccagtgcaggtactcgttccaagcttcggtccgtggcaatcggttcttcatcgtcgtcgatctccagacgtgtcatcaggtggtcgcgtttaggtgtctccatgaacttcacagtgcgcacgatttgcaccttcccgtcgccacgttgagaacgcggtatcccttcacaccagaggtccgccaataccataaaattgtattgccagcagcatgactccataataaagatttcaatatagcggcaagcaatagtaaatattgccgtaatatatattatattgttagttatttcttcgtgttcttctaactctcgctcttctaccactacttcccctaggcacgcctatctcgataaaatctctgcgatccacaggccaaaacacgccgagctcctcctcttcaaaacgcgcaatggcatcttgtggtaaatctgacgctggctgccaagtaggacgggggtatccaacccagctcacaaagtagtagtcgttgccatccagatcagtcttttttcataaataaactcaagggtgtatacatttggcccttcaatgtcggagctgacactctctggcgaagttgagtcgcttacaacagcattcgtaggggcacttggcgcaccgacgctagcccctactattttcgccaatgttggccggcgggctggctgacgagtacgactggtacttgaacgctttgagtcggccagcttgccaatatgtgcgaggcgcttgtttttcttgggcatcacggttcaagagggatagtgatggcccaagggaaacaagcgcatagactataaatttaatgttgaagtgcattgccgctataaattgtagccagcaaaagtgcgatgactataattaatatagaattggttctaacaataagtgaccgcacattaccttaaaattgatcatgcggtatatctatctatttaaagagataaataagcgcatatacatgcaacgaggcataccaactctagataaatcgcatcttcttcgtcaatatttgcatgttgactccggggaaatctgcatcgtagcagcgaatatttggcatatacatgtatgattcgttttagatcttaagtttcttccaattttcgcaatgaatattaaaaagtatcactaaaataatggcaaggtaaagatcgcactttcgttaactggattacgatctaaagggtttcctcagctctaacgctagcaaccgtcgtaacatcccacatggtgcggttgacgcgaaggaacgcgagctgttagatggtgcgaagttcacaccatcttcgtaccccaggaatcgatacttgaacgcctttgcatccagcttccaacgcttctcgtcggcgatgggagcgtacccgagtgtaccaaacaccttcatgttcttgagttggggcttggctcggtgcacgatatcgtggggtgtcttcacggtcaccgaattcgggatccgattcatgatccacgcagccgtgttgacggattccgcccaccacttcttgtcgattccttcatggtagagcatgcagcgcgccatcttcaccaaacttctgttcatgcgctcagccaatccattctgctgaggcgtgtgcggcaccgtcttctcatgcttgatgccgctgcggccgaggtaggccttgaactccttgcctgtgcacttgccgccattgtccgaacgcaggcgcttgatcggcttgcccgttgcgttctccattgctgccttgaagatcttgaactttgacagcacctccgatttcgctttcatgaagtacaccgtcacgtgtgtcgagtaatcatcgatgaaggtcactgcgtatgtgcagcctccaggtctcttggtctgcattggacccatgacgtccgtgtgtaccaagtcgagtacacctgcgctcttgaccaagttgtcagggtgacgtgggaagtcgtcagcgcgcatcttccccatgcaacatccagcgcacacgttatccgtcgacacgtcgcctgcaatgtgcggtaccccatcagccatcctcaacagctgttcgtagcgcttgtacaggatgtggccgagacgggcgtgcacgacggcccatggctccttacgagatgtcgtcgccgcacgacacaactcgtcccccactgtcttcagcttgtagaaatttccacagcgctttgcctccatcaccgtcaggctgccaaagcgaaagacacatttgtccttgctgaattgtgcgccgatgtccttctcggccagcttcgacaccgagatgaggctcccatcaacttccgggatgtacaaaacatccgacaatttgacggacgtcccgttcattagcttcaatcagacggtgccctttgcaactgcttcgattttcgtgccgtccgcgatcgtgatgcgggccggcatcctcagctccttcatggacacgaacttgtcccggacgctggtcatgtgcgagctggcaccagagtccacaagtcactccgacttcgccattgcacccgtagccgtaaacgcgaagtctgacgcttcctgcgcgacttgtctacgtccctcatcggccttcttcttgcggcactcttgttgtttgtgcccgagcttcttgcagtagaagcacttcccggagaacccgcgcttgcggactccttcttcgttgcgaatgccttctcccgagccgatgtcgaatcctccgagacttcaacaccagacagagcttggatcgcgtacgccaacgtcatgttcggcgtgttctcgagtacggtgctgaccatccggtactcgtccgttaaactgcccagcagcagcacgagttggcgagtctcgtccagagcttcaccaattgtctccatttgcagcactagctcctcgaaccggtccatatgtgccgcgaaccgcgtcccggggtccatcttgaagttgtgcaacttcttggtcacgacgagccgattcttgagagtgttccggttgaactgctcctcaagcaggcgccacgattctgcagcggttgtcgctccacggaagtagacttggtatgtgaatcacaccaaggaccttcagatcgtcggtcttccattgtaacgtggagcggtcactcagctggtcgaactctgtcttgacgatgtgggccagcagtctcttgcgcgacagcatcatccgtatgttgaactcctcgtggaagtagttggcttccacgagcttcacggtgtctgcgtagctttggctcataaccacttgagattatgcgggcgaggcttggtagtcgagtgttggttaggaaggaaatctgaaagtgaattagaatgagttaggccaaactaacgatcatatcctagcctcctatgcttaaacatgaatcgtaccaacgcacacctcctacttccaagtattagaggccggggatcaaaagtaaatgttgcagatcgtatccagaaaggcaacttcaacttgccaatcagaagtgtcaaatcttggggctccgccaatcagatcccagtattccaccacgtgtaccacaattgccaaccatcagcaacaacttcacagcaagcacgtgcctcgatacggagacacacaattagactgcgaagtgtacaatcgcaacaccgtcgtgccagttgcgctattcgatggaagtttgcactgaaagcctcactgtgtaagatgctcgtttgttctgtttcggtcgccaactgtgctaagctgcgggagcttgcgttggcggttctgggcagcaaggtccatgacgccgccctgactttgtctgctagctgccggtacttgttaaaccatattcgtagccttgtggacttcgggggcgttctggcagccagcgcccttatcagcagggcattgtctccaggaatgtgaatccgtttctgcttctgtatctttgcctcgctgagaacatgaaaaatcgccacgaaagctgcggtattcaacgtgcatttgggagataactttataacatgtggtaatgtatcacaaacacgccacaagtgggcattaaaacgcaggaagtgaaaactgtccacgtgtaagcgcaaccggctcttctactcaagtagcttgcgcgcacatacatgtacatggtaactgagagagccaccattttaagtgcgccaagctactgatcatgtaggcctcaagagatgagtcaaacctagctaagtgtgatgatgacatgcatagcttgccaatcgcatccgcaacaagcatatccaacccgcagcaggactagtggtgtgctcgctgagcaaccatattggggcagatccgagcgggcatcatgttcgggaagacaggcaagacacgaaagaattaatgctgggttgctaaagtaatctgtatccagcacctgcacctacagctccccctaggcttccgtaacggcaggagagagcgctcacaaactagctaaggtagttcgcattgcattttgcatctaagctgataagtacacgttggtttagtgggagtcccagctgccaaggatcgagaccacgtcacactaagcagttttgattgttctgatcgtgttggtctctttttgtgttagctgtaccgtaccgtgtgcatcccccataaacgctgcatcattaccactacaaggtgccagcatggctgtatacagcactccgcgatcctataagatggaaggaaaccgagttaccacaactcggtaagagggtcaccattttatggacaagggctggtatcgttttcattcatgctacatgttggcgggagcacttatcccattcggttgataggattcttttaagtaatccaatatacctcatcatcatcgggagcacttatcccgaccacgtggtcgggatatcctgattaccggatagtcaaaacgcgaccgatacttgagcacgcccatcgatcgatgttgatccgagcttcgtaggtggtggggttagcctatgaggttgagttcgagatagataaggagagcaaaagtacattcgtctgtggcgtgaacgcttcgtcgactacaacagtttggtgctacatacgttccctagcttctgttcgggaacgcgtaacaaccacgcgcatcggagccaccccagtgggtcaaagcattctaccagtaagaaggaagccactagagtggcatcactacttcatgcactgacgtaagcttctcttaggaatcctcctcattgtttggttgcgctaaaaccggtgtgtattcgaagcagaacttctaaaagctgatggtagttgtgtaggagatacgtagttagcttgatcaaggcatctatgcctacatgtacaggaattactgcagtcttctgtatgtcggctcgaccgacaaggtaaaccacatctcgatcttatctttgtcgtacatcgaagattgcagctccagaggcttcgagtgttcttcctaactgcttcaataactatggcatttatgaattgtagtcacaactctgtattggtccgcgttcacaggtagtagcgatcacactaatgggaaagtctggcatagttgcgaccttttcaacttggaattcaaggacagtacgatcaggaatcgtctcgggcgagatacactgatgatcgcgccgatgcgctcaaaacgcaatactacgtcaagtagttaaccaatttgagggtatgtggacgaaaggggggcgattcactcacttctagaacattgataattcagagaagtgtatccaaacctgagaaagcaatctaaacacaaataaacaactgctgctagcgtagattctattagagaggaaacaaacccacaaatcaaccaggtaaacctggaaggcggcatcaactctaagcgtaacattgatcgacgagcgcgtcagcgcgagcatcaagcatcaagaagcacaacgcaggggtttgaaggcagacctctctacccctgaatagatttttagcataaagttgtcgcgtaacgaaagtggcaacaccaggtctgccttcgcttggtatctgtagcccccactgacacaggcgcctgcattaccatcgatcttctgctgcaatctatttgaattcgaatttgttgcggtttaaacggctaactacatccgatgccgcgcactactgcagcttcgcctacggatcacgggcctccagggcacgtgcccgcggtagtagcccaaacacacgggtataaaccaaccaaatgccactagggcattcgaccgagatatacccctacgatatgaaaagagatatgctcattttcgcgcttcgtcggttcggagtccaccacctcgacgcgtccccaacacgttgttcacccttgttccttcttgtccttctcttccctctcgttctttcgtcaatagagcggtcacctctgcgccgcgctcgtcggaattcgatcccgacgccacgattgcctcacaaggtagcgtgaccagcagtctgcactctttccgctgtcttgcgcttcgtcgtcaccaatacaccctgtttttcgtttctgtttcgcctaccgtcttgatcagcctgttgtgccaggaggtcgacacccttcgtcgaccctggccaccttgaagatgccattgtcgtcatcttgctccttcctgggctcccgagggaggatttttctgctgcaatctagtatttttatctatcgaagcaggggcggagccagggccaaaatgggggggcatgcggccccccccccatttttcggcgaaggggtttcgattttttttaattagacggcacatgcatgaagttcacactgttcctccgcttagttgataataacatggaacgaaagaggaagcagccggcaatcacgaccttctttgtgaagaagccccgtcaagagcccgaagactttgacaaggcccgcagtattgaatcagatcctgggccacgaccccaacctgtaatgctgcgcgaaaaacaagagcaagcagcgttggaatggtgctcgctcaacaaaattcctgatagagccgaagaatgtttcgctggagactttgttaggcgggatcctgctcacagaccaccaaatttatttttcgttaagcaactgattgccgatcctcagctactgcgtgacgttatacaatcctacgtccgcctcggtccttaccaaccgcaactcaagcaatatccggcccgtgacatcggtggatgcatgcgtgcttgcttttcgggcccagtggtttgaaaaaaatcatggctcgaataatctccttcgacggacgcggtgtattgcttatgctgctacctcagccgagaagtaataacgcagcaaagcgagctcacagtgtatgcacaacctacaacgggctataggaactggaaaaagaccactacaaaaaacggatttgcaaaacatgttgggacaaaatccagctcgaagcaccactcagctctgatcgatttcgacaatcggagatcctgtcagaatgacgttggtgtggctctgaattctcaaaagattagtgaacgacaacaaaaccgggagcgtctaacttattctggagatctgccttctcctagcaaaacaggaaattgcattttggggcagcgacgataaggtatacgagcggtttaatttttatgtaagaaatgacaacactggactaacgttttgttttactatgcacaggatacgtcacaaaataatggcaattttcttgagattgttcagtcatggcacagcacacgccatcgttttctcgcgcaatgtccttagctggggaaaacgctgtgtacacatcgccacaaattcaacgtgaactgatcaaatgtgcggctgatgttgttcgaaagcatattatggaggtcgagattgcagatggatatttttctgttctggtggatgaagcaagctgcatggcgaagaaagagcacatggctttcgtaattctttttgtgtgcgctgcaacggggactattagataaagattttttggaattgtccatgttcgcgatacgaatgcggagatactgtacgatggtttgataacgcagttagagatgtggggattgcttttggcgaactgtagaggccagagatatgatggtgcgtccaacatgtcgggtgattttactggtcttcagcgacgtctacactcccagtgtccttacgcctactatgttcactgtttcgcgcatcgacttaatcccgtccttgttgcagtgactatgaacacggtctcggtggtgcaatgcttcgacaccgtgcaagggattcacactactgtaagtgcttcgtgtaaaaggaaagatcaactcgctgtggaattggaaaaaatgcttgatcaagggcatctagaatctggtagaggcttaaatcaaccaacttctaccgagggttttagcaaaacaaggtggaattgccacattcgcgcgttaagaaaagtcaagatgctttgggccccaattactagtgggttagagcgtgtagtgggcgatggtgtgaacccccacaaacgcgctgaggcgtcaggaattttagagaagatgtggactttcgacttcgtatttcatatggagattctcactgcagttttgaaaaaaacacaaatcggctgtcccaatttttgcagaaagatgacgtcaatatcgtgtcagctgtgaatatgacgaagcaggtatccaaagaaataaaagaaatgctcgatgatagttctatgactgggaactcgccaagttttgaatcgatttggaactcatcggtcaacttttgcaaatcaatacaagttgacgacacccctctcattcctgacaaaaatgacgtgtggaaacgacgcgtaatgagaaatcaggggggggcagggctggaattccaggagcggactcatccagggatgatgtccagccttcacaagaagctcactatcgtgacgaagtatataactgtatccttcgtgacctgatttatgaaatggattcacgatttagtggagaagtccttagtctcatggaattgtgcggatcgctcagtccacgtgataatttcaagaattggagcgctactaaaatagttgagctggctaaaacattttatcccgatgatttcaccgatgagctggacgaccttcgagaagaggccactcggtttcgcaatttggcaaagatcgacaaaaggttccaaaaattgaagacaacgcaacaactatgcatccaactcgtcgggaccgataacaacgagttcccgaccttgcaccgaattattaacttggtgtgtgtgctgcctgaaacaactgctactacggagaggtctttctcagtcatgaaaagaattaagacgcggcttagaacaacaatgggagatctttggatgtcaaacctgatggttttggctaacgagcgtgatcttacaaacagcatcgacaaagactcggtcctcgaaaagtttaaagggatgacaaaaagaagaatcgaaatgtaggttgtggattttactttaaaaagatctatgcccccccattttttaaggctggctccgcctctgtatctaaggcattaccagcaaacttcgagcgcaccggcgcgatcatccgtgcgacgcattaacaacaacactttttgactatctggtggtaatggatatccgaccacgtgggataagtgctccccatgtaaccttttggagggcccagtgcggcaccggggtcacaccggtttcaggacaatgtaccagttaggtgtcaagagggtcaccttttgacttgacgtaccacggatataatcctatttggtctgcgatagcagcactaacgttgcttcctatcccagtattaagattcaatctgttcaacttaatagatctacagttccgagtcgtaagcgatgcctcatcctaatgatatcatcacttcaacggggagagggggtttctgttgcggcttcaaataatcagatacaagcagctttattgctatcccagaaatattttttgttagattaatgacaaggtattggttgctgcataaacaagtaggtcgtgaagaaccaccttatcgttatttcctcagtaaatgaagattttcacgagtggagcagtgaaaatagctttttagaaggaaggcaggaagttgaaaccaacgcagatgaagacgtagagcagcgttagtttcagacttcctttacagcgctcacagcttaagaaaagcgacccttcggctctctgcattcgcctcggcaacatgccgcgtctaacgtcgtgatcgccactgcatctcctgcctgaggacgtagcggcaggcgccttccctctgccattctacgcccgagtcgtcggtatagagggggagaaggtcaagttccgaagctttgacggggaaaaaggagcgctttcgcggtccgtcgccgctcgccgaacagtcacgttagcggtcgtgaacaagatggggagggtgtcgttgcttcgccggccagtggccgtcaccacaggagatccggagcccaagactttccacgaggtgacagtcgagtccgacggtaccaaataccgttgcttaagtcgacgcgatcaaggtggtggcgcctgtggtgtctctacttctgcagcgtgtcgcgctcgacacgagcgagtggagttctgcggacgtcaacaacatgcagacggccatactatcgagggtattgggagaagggaataacgagggaagccggtctatcagctgtatacttagtggactgatcgacgaccagaatcaccccgagtcgtttgcgatctgcaagtgggtggatcctcagtcgggatcagagacacaatttcctctccaacacgtggtcgactacgccttctacatcgacggtgaagccgttggcgcgccggcggcacttggcgaatcgttttgacgcgcacacgacgaatatgtggtgtccaccggtacacaagaggtacaacgccaatctggcaatacagagtcatgtgaacttttcgaccccttcaacgatgatgacgacggttttccagatgcatcggacccgatttccagaccggttccggtcactgtgcaagcagcaggatcaaaacgcagccaatccttccatggtaccagtgaggaagttgctgagcctccataccaaagacgccgaaccacagaggccactgattctctccacaaggatgccctgattgtagcgaggctaagtcacgaccccgaactactcgaccgtttcctgaacttccgtgagcagtccaggactcaagcgtccggtgcatcagcagatgatgaagaaaaacaaccgctaccaccattggcgtcgccgttcaaggccaagagtacgaccaagaagtccaagtatgcgttttcgccacagcgagagcgccaggaagttcacgacaagctaacatcggagcgccacagaggtaaggaccctgatacttatgtgcatagtcagatccgatccggtgccctgctttgcaagtctctcccaggcgtgttgactcgcgcgtacgactaccagtttggcattgaaggtctctcgataatgcacttcagcttcatggacagaaagaaacgtatggagtggatagactcgggcagtgccaatttctcgaacgtttcggcgacagcggactttgaaccagctccagcagccaccagcatcaacgacgttgttggtgcggtgcgcgttttccaggtgttcgcgcgcgaatactgcgtcactagcgcgattgagctggcggatgccatcattggatttattgaggccaagattatggctctgcgctgggaaccggaggacgtaccggccattgtttactgggtgaacgacgttctcgaaagctaccgaaatgcagtcgcgtcttcggataaagatccgggtgctattcgacttcgatgcacgctggatgaccccttctgcgtgaaatattgcaagaagtccaagaacggcaaattcagcaattagaacagaagagatcaacgagtagagcaccctttggcacggtcgaagcaacgcacgccatcctgggccgttccgcctcggcgagacagcgaggaaaaaggaaagcacacggccccattccgcccaaagtgctgcaaaaactgccgaagcagaatgacacgcagggaggaagtcgccggctctgcatgtggtttctatcgaatgcagggtgtgatgccgatcttgatgaaggagctcacgacggccgggcccaatttgttttgaaaacgctagacgccttnnnnnnnnnnnnnnnnnnnnnnnnnnnnnnnnnnnnnnnnnnnnnnnnnnnnnnnnnnnnnnnnnnnnnnnnnnnnnnnnnnnnnnnnnnnnnnnnnnnncgatgatgacgacggttttccagatgcatcggacccgatttccagaccggttccggtcactgtgcaagcagcaggatcaaaacgcagccaatccttccatggtaccagtgaggaagttgctgagcctccataccaaagacgccgaaccacagaggccactgattctctccacaaggatgccctgattgtagcgaggctaagtcacgaccccgaactactcgaccgtttcctgaacttccgtgagcagtccaggactcaagcgtccggtgcatcagcagatgatgaagaaaaacaaccgctaccaccattggcgtcgccgttcaaggccaagagtacgaccaagaagtccaagtatgcgttttcgccacagcgagagcgccaggaagttcacgacaagctaacatcggagcgccacagaggtaaggaccctgatacttatgtgcatagtcagatccgatccggtgccctgctttgcaagtctctcccaggcgtgttgactcgcgcgtacgactaccagtttggcattgaaggtctctcgataatgcacttcagcttcatggacagaaagaaacgtatggagtggatagactcgggcagtgccaatttctcgaacgtttcggcaacagcggactttgaaccagctccagcagccaccagcatcaacgacgttgttggtgcggtgcgcgttttccaggtgttcgcgcgcgaatactgcgtcactagcgcgattgagctggcggatgccatcattggatttattgaggccaagattatggctctgcgctgggaaccggaggacgtaccggccattgtttactgggtgaacgacgttctcgaaagctaccgaaatgcagtcgcgtcttcggataaagatccgggtgctattcgacttcgatgcacgctggatgaccccttctgcgtgaaatattgcaagaagtccaagaacggcaaattcagcaattagaacagaagagatcaacgagtagagcaccctttggcacggtcgaagcaacgcacgccatcctgggccgttccgcctcggcgagacagcgaggaaaaaggaaagcacacggccccattccgcccaaagtgctgcaaaaactgccgaagcagaatgacacgcagggaggaagtcgccggctctgcatgtggtttctatcgaatgcagggtgtgatgccgatcttgatgaaggagctcacgacggccgggcccaatttgttttgaaaacgctagacgccttggtcaaagccgagatcgagaagcgcttcgatggactgaagccggaatacaaacacttatgactacctgtggctgctcggtcgccatcggcacacatgacgctccgatccggttactccccaacgaagcctgcaaacgttatatcgaatcgatcagaatgccaaataattgaatgcaaacccaagttgaacgacgctgagcctacccccgctgatgttcgttctcgtagtgcatttgcggcacctacaggcgatattagtgtggtcgctgtagaaactctccgttccacgtcaaagacatctctcacaacctgcactcgaatctcaaacgacgctgagcctgcccccagcgctgatggttgggctaacccccacgagatgccccaagtattggctgctttggatgccgcagaaaatctccgttccagatcagatatcaaaatattacgcacggttgctcttaagaacgacgctgagcctgcccctagtgccactgcttggggtaacacatctgtgctgcctcaaatagtgactgctgtggatgctgcagaaaatctccgttcaaaacctgagcaaagtcctcaccatcctaccacggcgtatgaatcgaattctattgcgcctcatcaagccaggatgacttcgtcccatgataatgctgcgcatgcctacagctccaccgcttcgcagaatctggtatctctctcacgggagtctgctattaccatacagcacgagctcgagttaaggcttcttcgagacgaagctcgaaaatcccagctacaccgccactgggggctgcgacgatcgcattttacttccgctgacaaatcggtcatcgacatggttgcgtgccgctcgctatcggagataattcgatcgagacagctaagcgtggaggacgcggcaaaattattgaggggcgaaactctacctgactgtagaccaaacaaggcgcttgacccggatcgtttgcggtatgtactacgtgggtacccacacttagacctcctgatcaatatcgccacgaaaggtatcgaggcacagtggggcgatggccccaaaccagttcggcctccacccaaaaaccacgggtcgtgtcgtcgacatctgaaagccgtcggtaaaagcaaccgcgcgggccaagatagcgggcagtacatggttgtcgacgccgatatcctggagcgatggtcgaacgtaatctgcagcccactagtagcggttgagaagaaggacgtggatccctctgttgaagtgagaaccattcacgacctctcgtacccatttggtaattctacgaacgattactactagaaaaagtcggtgccagccctcacttacgagccagtgactaatattgctcgacgtatcgaacacttggctacgcgtcatcctggtgtccgcgtatgtatcctgaaaaggcgatgtgaaaggtgcataccgacatctaatgtctatagcatctcaagtatttcggatggcagctctggtgacagacctcaagattgtactgatcgacttagcagcccccttcggatggtcgggatccccaccattttatgggctgtttggacgtgccatctcgtggttgatgacaactaattcacctgccacagtcgctgattccgaagataccgaacccttttttggctacgaatgggtagatgatcatattttagtcgagctggacgtcaatgatcggctacatctcgcagaagcaaccctacggcatgcgatgttagccgtgctgggaatccgatcatttaatgatgccaagttctcgaactggagcaccgaactcgtcgccctaggtctgctctggaacacggaaaggcggacagtatcgatgccagctgacaaaatatcgatgccagctgacaaaataaggcgctacaaacgagtaaatacgatgattcagcatctagcagctacaaaatcggatctacaaaaactcctagggtacgctaagacatgtgtcaacttgcttgcgggccgccaagccattttaccaacagccgcaagcacttgcagtcgccgcaccacggtttgcaaaagtaaaactctccgccggggcgaaggcggatctacgatggtttcaaaacatcctgggtcatgggaatttcgctgcgctacccctgatcatgtttggtgatctccctccatccgatgtggaaatgtacatggatgcttcaaacatgggtttggcgattctggaccctggcgcaaataaatttatccaagaaaattttgacgagaccgagactcttctaatcgccaacgatgacacgcatttcaacagcttctccattaatgtgcgggagcatctgtgcatcgcattggcactgtggacctggggttcgtcgtggtcaagcaattcgtccggccaaatgcttcacgtgaagtgttggagtgacaatatttcagcagtgcagtggagcaatcgactttcctcaaagaatgaactcatccaagaaatcaacaggtcaattggtctagccgaagcctacttcaacttacgagtatcggtggagcatttaccagggtcgaccaacaccatggcagacgcagcatcgagggcctggacggatccttataaaactgcgtggactaatttttctgtgtcgtgggaacagacagccgtgccgccaatctttcgcaaactctacacgaacttctcgaatgacttcaatccccctcactggcctcgtcatcaaacgttaaatacacagctacttggtcacagtgggtgcgatggtgcacggaaatgcgactgcctaaatggttacccaaggacgaagagcgccattcatatcagctcgcacttttcgcaatctactgctggaaattcggatggaactcgtccgaaagaggcaattctacctccaccatgctctccaaactctgccacatctcgtggtatcacaagcgcttcgtcggatacaaagtcgaactgtcccccggacaccagcttgctgtcgtcggcatgcgcagagaagaccctccaaccaaccccaaggcccccgtcaccatgcatctcctcggaaaattgcgcagctccctcgatttttcctgtgtccagcactgagtcatctggggggcttcggtgctgggtttcttctttcttttgcgccgctccgagtatctagctgacggcacgagggtaaaagaatatgctattcaaaggtccgatgtacgcttcctggatgatcaaggccgcgaccaagaattgatcgatcgagtgaaaaaggttcaaattcgttttcgtggcagcaagacagatcagtttggtgattgatgtactcgtgtgctgggtcggtctggtcacgcccaatgctgcccagtaatggcgtgctggtatctcgttcagcatcacctttccattggcgcgagggcggacactactctgcaaagttacgcggacccacaacttacaagtccgagacctcgtcagtgctttgaaacacgcagctgaactcattgggcacgaaccagacagttacggctcccactcacttcgtagcggaggtgcctcagcactcttcaatgcgggctacgacagcttggtcatcaagcttttcgggaggtggagatcggacgccgttgagcggtacacaagaatgagctcacaactaacagcacggatggcgggcgacatgatggccaaggcaacgtaatcaaggggcaacctccacgccacaccccggctgtggaggcgctgcaatgtaattttcaactttgtgccgggttcggcacgcccccaacaagtaagacgacgacaactgaaagtgattatgctggcgcgtatatgattgcaagcttggtttgcatgtagatcgcatcgaatttccattttcagccattgctacaagtcgagctggaaatcgagcagtccaaaaatgcacctcggttcaaaatgaaagatccttacatgcttcatatgctttccttagtttaacccgggtatgttccagcaggaatacatcgatgttcagcgatgtatagatttactgtacaggtcggggacgtttatttacaagtacctgctacaagattctgaaacactgctggcctccaattcgtagatcaaagaatgtggaggaatatataatactgatagctctcggaggacaataaaggtggcgctagattagataacagtgagacattatgcaggctgaccttgctcagatctcactgctcagcgagacctctgaatataaaaaaatgcagatcgtgccagaaatgttcagattttttccacaccaattcgtactcagacggtggtagtggctcagcatcgaactcgatgcgccctcaagtgggcccatcagcgacctcgagcttcctgcatatccatcgattgtaagtacagtacaatattgttttagcagccgtgccgcatcttgcaacttgctagactaatttcaagatcagcaaatgtgaaaatttagggtgattcaaattttgggtccacatatccaattgtctatttttggtacctcgagctccgtaacctcgagctccatagtttttcggtggggttgtactgcggtcgtatctccatcgtgccagagatttaggcgaagtactccagcatcttcgccgagtcgtcacccaaatcaccgaagtatgccgtgtagccgcccttttgaagcagcagaagaccgtcaaacagctcacagcatgacatgctgggctggtggatcgtgcacagcaccgtgcgagctaatcgactgcaccccatcccgcatgactatcaacgccgaacgcgcatccaggccacttttgggctcatctaggaacagaatactcgggctcaagcacctccaccccgaccgtcacgcgcttcttctgctccacaaacgaagtctccgtcatttccccaccgatcagcgtcagttcaagcagcctcatgcacttttcctcggtgaaattcggcggcagtcgaagtttcgacgagaacatcagcacctcgtaggtcgacgcagcctccgagtgactgtccatctgctcgcagtacgctgtgatgccacagcagcgtccttcagctctccattcacgtaaattccaaaggcccttgaacttggcgtgccgggtgaaacgcagcgcgcttgcgtcgaaacgttgatagtacacttccagcacctcgcatcgcggtccgcgatgccaaatccgatgtagccgtgccttgctcgatgcagaaacgctccagtaaagccttaattttagtgatggggacgtaaacgacgttaacctttacctatcatatagtatatgctgtatgatagggttttttttggcgaatttgctattttgcaatagctagtgtaaacgtatgctagtcataactatgcatctggcgttaaaattacgaaactcgcactagaactacatcaaaactactgctcaacttttgaagctatgatatagatacgccgaatgatgggttttcagttaacgtcgtttacgtccccatcactacttaatttgtccgcgaagagcaagaccgagatgaccgacaagacgcctggcaaactgtacagcctatcggagattccactgcagacaggcggtcctctcagcaactcaactgaacaacgcgacggaatgctccactaacggatttaccgaaaataagccggtcttctaattctcataagcccctgcaaaccgaacaattctgacgaggggacttgtattcgggtggggtattcgggtggggacttctatttcatggaagtgttgcatcaaggctggttctgtactaaggaagatctacttttcttggtcaaattgtctatgagctcgcaaaggagcgtctcgctcgtagtaagaaccccgggatcattgcattggttcgtctgaaagcattgacgccgttccgattcatgactgacaagctggccaagtcgagatgccaagaagttttgtctaggcttaggtagagccgctaaatcagggtgcctggaggtacgctcaagctcacatcgataagcttttgggtaagaagcagcccctcgagtacattagccgcgggggtttaaccgctttcgctatccgtttgccctgcacttgcagcagcagcagcttaaaagggttttgaacgaagtgtctgggccacacaagtaagttctaggccgtacaagacgctgcaaaagcgcaagtaggcgttcaatgctcgtcacgaaaaaataaacagtcgttcagttcatcttctttagcagtttacatgtagatctttgtctaagacattaatgctgatggagtacatgtagcgagatcggttgacgggttgacggccacagttcattgctttttccaggtacatcgtatcgttgtgaagcaaaaccaatagggttggaatgagctcgagctccaaagcagagttcgggcgaacatttttaaaaactaaatgtttgagtacatttataaaaaaatagatgtccggtcttttatttggtacatgacttctattttcagtaactccaacctgttcctgaccggacttctatttcctacaggtcttgtattcgggaaaaaccgttagtgtgaagttataaacaaacagtggattatacgcgatttcagactgaacgatagcaatatattccccgtagtgtattacatcgctgtcgcgtattcaagcgatggaagtgcatactaggcctcgctacatgccgtccgtgttcatgcccagcttctttgcttgcctaataagccacttgtgctgctccgttgggctcatgttctgacccttcgtgaattttttcgaagtgagcttcgcccaaaccttcgaccagtcaattcgctcttcatcgatctcgtcgttcttctcgacacggcgaagcattcgcccgccatcggcgtgagcggaatcagcggtagcagaggaggcctcgttctcgacctcagcgatattggatgccgtggccgaagggagggcagcgccgctggcatggagagaggccgcgatgaccgccgcgaagatgaaagtgagacgcatagtggttgtcggttcttgaggttttggacggaagtcctggcggggttatttgcagggctgtggtggtttgctcgggtgccgtgaagcaaattgtggaatgagatgctctcgaggttcgtccggcacaagagtgggctccgctactgtttgatacctagtctgcatgccctgtacagtagagtccaagcctcacatatcggatcttgctatcaagtgtttgttgaaccgacaggcttggctcagagccgttgcaaaccaagagcaaacaaagcgcggttgcgaatgatggcgtttcggatgtgtacctcttttcttgcattcaactaaacgattgtttagtcacagattgtgacgttgttttgaaaactacaggtggaaaagcagcaaatcgcggtgttgtcacaatctgtgacaaaacaatcgtttagttaaaaatagtgatgggggcctgtcgtcgtccccgctgcagttagcgcgctgttgatatcacctctccataaagagtgtacgttcatttttgtttgtttcgcaaaattcgtaaacgatttattttacatgacgtcagttaagaggcgccctctcttaacttggcaattcgtgcactcctactcactagtaagggtgacagtactggggtgagctccggtttcagaccctccaactcgtcgctatgctggctagaggtcttcatccattcgctatcaaggtcatgttaacgatgaaactcattcgttgtcaagataggtgccggtacatcatactggagttatacttgccaaagctgaggtaagatgcctacagtatctttgtcaacagcttcacgattttggggacccacagaagcacaccttctacgagcccgagcccgtcatcttcaaaagtgggctccccctaatacgagagccaaaagtcgcacaaaatgggctccctcatggtaagtacgagatcaaggagcccttgttcgggctccccccaaatttagcttcaaatctatgacgggctcttcatagtaatatctgattggccaactttacctagacttaaggcgagcaacttcgcgtgatcgatgcgccacgctagaagatcgagctcaaagatcaccacactagaagatctcgcgccgctcatatgtgtacagccgctacgaggccaccccagcgtcgctgatcgtccttcctttccctcaaggagaagccctctttcctatgccttttcaggttagaacctggagatacttcaatgacggccaatcatcagcgagatatttaacacaggtgagggggggggggtcttaacgagggctcacagttctggagggctccattcacttaacctattgaactcaagagcccaggagcccggctctccccagggctcgtagaaggtgtgcacagaagttctgtcagaagttctgacgtcgcagattgtgacgttgttctgagagacactacaggtggaaaagcggcaactattacgctggaccagaggtcggaaaaaatagtgcaatacaatacataatcagttttttcaatatacattttattattgggctacagtggtccccgtacaatattaaattggcccaattattgacaataaattccataaaagtgccttggctggactcctatagtttttgtacaaagcttcctgttgatggcgtcatctccagtgtgacgggacacacagcacttcttaacagaggaagcaggagtatacaaactccaagtgaacagccgttcacgtgtccctggtctgaaggggacgacttgacttgaaaagcggtagatctaagactgaatgtatttataggttggtacagatttgcctgcatacaaatcttaagttccctatagtttgtgtcatacaaaatgtatctgttggctctgaggccacttgggccactatccaggggagtgaccgatgtagccatcccggaatagtgacaaggtcactattccatgtaaccccgttacatcctcccccactgagattcgatcttatcgaccaaaaggttacgccggtgactcacatttcactcgcaaagtcgaaatccatcgacaacggcgcgagctctggcgcctcggctcccgggcctcacagagcaactggcgcatcgccgagcaagccgcagggtttccacgtcgactggaagcatgcctccaaagcgcagtgcgaaagcacctccgaaaccgcgggccatagggccgaagactagggcggccaaggccaaggacgagtcgtccgcgctgatggaggctacgaaggcggccgaggaggtggtgcgctctcgtagcagcacgccggagagtggccgtcaggccggggctcggagcaagtctcctgacgccacacaaggcaaggaggagagtcctcggggccataaaagcccggctcgcgactgggaagccgccgtctttgactgcacgatggtccagtactccggtgagagttcacccgacgacgagaacgtctcggagggcagcacgcacgctgccgaaggcacggagctggcggcaggcgacatgaccaacgcctcggccgacgtaaaggcctcgtcagagaaggaggcggaggacgccgagtccggctcaggcgacagcaagcagtcgcacgacgaagtcgccatggtcgacgctggggtcgtggccatgaagtcgccgagcgacgcggtgtccaagcccaaggaggtgctggcatccaagcatctgacgctggcacaaagtcgtgagcgtgcccaagcgtcgaaagcggctgccgctgcgaaggccgccgaggccaaggcgaagaagcgttcagcttccaggtcgcctcgcggctccagctccaagctgttcatcgcctcggagtctgaggacgaggagggtgccgtccacgagcccaaggagctctccaacaacctcgacgagcagcagcagcaataccacgctgctagctcgggtgcgtatgccaggcagccgactgccacgactgccatcgagtcttcttcaggcggggatgccacgtacccgcagggctacttcccgcccgagcctggcactggtgcgccagcgctgttggagaagctctcggctcctcgtggccttatcggcgggtacacctcgaggggttcctatgagcgtgctcttgttgagaaagagccactctttcttggcgacgttgaagtcgcccggtgtgtgctactagcaccacacaagctcacactgaaggagttcaccacccttcgcaggaagccggaggacaagggtggactccatcctgtgtggggtttccactgggtcaagccgaatgacaacatgacctggagcgaggtggaagacctcttctggcgcaacatccaccgcaaagggtattccgaccaagagttcaaagaactccgtgaggatcgcactatgtccgcaatcctggacgtgcgcgagctccgcatcgagttcgctcaactcgtgagcaagcgcaagctccactcgaagatggacgagctgaagcaagaggcgagagccaaagctcgtgaagagcgtgggcgtggtgcgactacgtctgctaccgtgccccgggtaccggccgagaagccaaggactacttacgaagctgccgctgcttctcgtcccatatcgcaacagccttcgggcagtctgcctggagctgctcaacgggctccctgactcagggtaacccctccacttcacgagcagctggcgcttgccatggagccgccgctctcggacgactcgttccacgtggtagtggatctgcccattacgatcaagcagggccggcggtggcctcgcatggccatggctacgagcctgaggcgacgcagccgtatgctggggccccgagtcaggtggtggccctgcagcaagaggagattcgtcttctccgggaccgtgtgtacgtcctcgagatcgcgcttggcgtcggccttggtggcgaggctgccgctcgtgctggtcagcctggtgccgtggagcggctccgtgaggatgttgcctcgctctatcaagaaactcgcagtctccatggccgtgtggatcgtcgagccgacctgtcgtcttacgactcgctgcgaaaccagctcgctggccttcgggccgagcttcatggccacgcgccgtatccggagcagcagcagccccactcgtatcaggcccagtttggccagggctcgtacggggcccctgcgtatgctgctccgatgtacgccgcgccgtcttacgaccagcgcgcgtatcaggcgccttaccgcgactcgacgccgcgcttcgaggagctgcgctcttctccagcggaccacccaccgcttcctgcggggcagccagagccagagggtcatggtacctcttaagacgacccacgtaaaacgtcgggtgagtcgtcatcgacttgggcaagtctatggtgtacgccgcgccatgccggctgagggccgtgacttcagctggttgctctcgaccgagctaacagtgtttagcggtaggtttctagtatctaggagaactaaatccccaaccttaaacacgttcatgtttcctcttccatttcggtcagagtactccttctgtttatcttgggcttgcgccatgatgtctcgcaccctgctgattatgttcagcctgtcttcggtaaacgaggacagttgcttccgcaaggtggctggactcacgtccgagacttgggaggaaaaggttttccgagcttctcccccacttaggaccgaagccccggtactgcctcgtaatgtgagcggcacctgagggtggcgcaacccgtccaggtaaaagggcgtaaagcccgtcgatgcatgtaccgcactgttgagtgcgaactcaaccatgggcaagcgatcagcccaagcgcggggcatctccgcgcagatactgcggagcgtgtcttcgagcacgcgattgacgcgctccatctggccatccgtctgcgggtggtccgccgtcgacatcgacagtcgtgtgccgagaaggcgaaacagcgtctgccagaacgtagcggtgaaccgcgggtctcgatcagagacaatggtctcgggcagaccgtggtgtcggaagacacagtccatgaacaggcgagcgacctcgtcgccagtgacggtgtcacgaactggagcaaagtggaccatcttgctcagacggcacacgaaggcaacaacaccagtgttgccacggtcatcagccggaagtccgaagacaaagtcgagactcatcgacttccagcagtccgctgggaccggcaggctatgcaatggtgccgaggcgtgaccggcaggcttcacacgctggcacgtctcgcacgtacggacgtaggaggcgacccacttgtacatgtgacgccaccaaaacatctgcgagacagacgcgtacgtcttctcacggccgagatggccactggatggagcgtcgtgcgcctccatcaggatgtcgtacttgagatcctcgtcgttgggcgcgacaatacggggaggatcctccggctcgaccctatagtggagcaaaccgtcagcccactcatagcggtgcagccttgcacgttgtcggggcgtgagccactcggccttggcttccgagccagcggccaagaaccacacaagaggtccgagactggcatcgtctcggtaccccagcctgatgcgatcatacagatccgtcgtgacccgattaatatgagcaagctcgtagtcgggtcggcgcgacagcgcgtcggcaagcacgttcaacttgcccggcttgtactcgacacggaagttgtattccgcgaagaatgacagccaacgcatcatccgctgtgagagatgcggcgtgttgatggcagtccgcgaggacgcgtggtctgtataaacgacaaagggcgtcgagcccaggaggtgcactcggaacttgacaagagcgtacttcatggcaagtagctccttgtcgtggactggatagttccgttcggctgccttgagctgcctggactggaacgagatgacccgttcgcggccttcatcgtcggcctgcaatagcgcacagccaattgcgtagtcagactacgctgaaaggcttcgtctcgtccggcaatgccaggactggcgcgcgctgtaagctcgctttgatgtcgttaaaagcatcttgatggcgacgctcccagcgccagtcgacatccttcttcaggagatccgacaagggccgtgccagctcggcgtagcctgcactatacttgtgcaggtagttggcgaggcccaaccactgtagtacgtccttctgcgaccgacgtggcggccaagccgcgatggttttcaccttctccgggtccgcccggaccccggcgctgctgacgaagcagcccaggaccttgatcacctcagccgcgaacacacacttgtcgatgttggcgtacagcttgttcgcccgcatgacttcgaacacacgtcgaaggtgctggagatgcacctccatggccgtctggcctgcctcggcacggctgtggacgaagatgccgtcaaagtacatctgtgtgaacgcacgcaaaggtcggaacagttgtgtgaccaagcgattgaacgttgccggggcgttagaaagcccctgaggcatgaccagccactcccagagcataccgctcggcgtgctcacagccgtgagtgggatgtcgctctggcgcatcaggatctggtagtatccgtccaccaggtccagcgcgctatacagcgtgcagccggccatgttgttgagcaacacgtccttgcgcgggatcggtgtctgcgcaggcactgtcgcgctgttcagcttgtaataagcatgaaccagacgtcactttccgttcggtttgcgaaaacagaaggtaagcgtcgagtgcggggacttcgactcccgcaccatgcctgccttcgccttggcggcaaagaaggcatcaatgacttcacactgctcccggggaagaggccattgcctcgtgacacagtacttcgtgcccggcacgagatcgatctcgtgcctgattcccctgtccggagggagattggacggtggatccttggacaccacgtcctcgaactccttcgccaagtggtacaccgggtcccaggggttcttaagaatctcagagcccatgcgcgacgcgcgctgtctctggaactcctccaggactgcctggtccatgacagaggacgagtacaactcggccgacgtggactccggtcggaggagaaccaactctgcgatctccccggcctttagctcggccaagaagtcctccatggcgagctcctcaagggtcagcaactctgaaacctcgggcagagctgtaagctcgacagctcctgtcttgacccgacgaccggtcacgccgtcgaagatgtgataacactcttcggcggctggagccttggctggaggctcggagtcgctggcgactggcgtcgtcggccacacgactaggcccggcttacgacgtgaccttcgggtgtcttcgtcttgtggcgccgccttgacggcaccaccgatcttctcgatctcgtgcggaacgacgttacccgccttgtccttgagcggaacttggttacccgccttgttcttgagcggaactatgttacccacctcgccgtgtggaacttggttacccacaccaggagcgcttccagcgactcctgcatcagttatggtctgagtgacctcctgtggaagtatgttacccacatcggaggcgcctgcagtgccttcctcatccgttacggtctgagtgacctcgcgtggaacttggttacccacgccaacgccagcggcgccttctccagcagcccttgctgcctgcggtacttcgttacccgcgtgtggacctacgttacccacctggtaggtgctgtccggcacctccactctcaggccttgtccggcccggtcggagtcgtcgtcagtctcgacggacccgaagaactcattagacgctgctgcgccctggcggccctcgcgggcgccccagttgctgccagaggtgggaacatgactcaccaaagctctgtcagagcgtgggggacgactggccccgatggccttgccgcgccagtcgatcccaggctcgtgtttctccagccacggcatgccaaggatcaagtcgtacttgtccatgtctaggaccaagaacggctccgtgctgtcgaagtcctcgaacttgacagtgaggtccatgtggacctgaggtacttctaccaccgtaccggcggccagtcttaccgagaccagcccgctgcctttgctgactcgtagcgcatcggcgtacttgtcgcgattgcgtgcgacagtctggcggcgcgcaaagttcttggacgccccagggtcgatcaagattctcaagggatgatcgtatcccggtacactcgcgtgcaccacaagcagcccaccgctgcccttctccgcttcgagagtacagagactctcaggggctaagtccccatggcgtgcgccacccgcatgcccctcatgaagacttagtgtttccccagtagggcgccccgcccctactggtgtccggcgttcccctggttcctggggcgcggcttctgccagcgacccctagagccaaagggcttcgaagagaacttcttcttcggtcctcccgtgggacaagcacgtttcatgtgcccaagcttgccacagccgtagcagcgaatgtcgctctgctcggccatgcccagatccatgggaaccggcccgttgatcgctccattgccggagttaccattaggcgcaccgccagaggcagagttgctctgccataccgtggcgggggtacgagcctgcttgtggctgtactcctcctggagggcgatctgaatcgcctcctccatagtgtttgcttgcgcacggaacagttgcgtgcgggcaggaccgacacgcagaccgtccatgaacacggtcaccttgatgtgtccaggcagggggttccccaccaaagaggcagtgagcactcgcatctcctggatgtactcatgcagctcgcgccttccttgtttgcaggcgaggaagcgcgaacgcttgcggtactcgtagttcgccggaagaaacgcggcccgcagctgctcgcacagctgggaccatgatgcgaagcatccaggcgtcgtcgcttcgcgcgtatacgcccaactcttagcgcgaccactagggttggagagcgcaaaggcgacacggagtcgctcgtccgagacgagagccgcgtccatcgcgagctcaacctctcgaacccagaagtgaaggttttctccttccttcccttcgaaggggtgaaccttcagccgcaggggtttcggttgcaccggcttcggcgcggccgcagtggcctgcagcccttgaacgtgggcgatgagccctcgctcgtaggtgtcgaacgcgttgatacgctcaacctgctcagccggcgtcgccgccgctaagctacgcagggcatctgtcccaaagatgcctgccatcttacgaacggactcgtactgcgagtcgttcagatggggaaactccgtacgatccatcttggctcactcgatgagaccacagaggattcaggtagtccaatctacccgcgtaggcgtaggattgactacaagtgctaccaagtgtgacggggcacacagcacttcttaacagaggaagcaggagtatacaaactccaagtgaacagccgttcacgtgtccctggtctgaaggggacgacttgacttgaaaagcggtagatctaagactgaatgtatttataggttggtacagatttgcctgcatacaaatcttaagttccctatagtttgtgtcattcaaaatgtatctgttggctctgaggccacttgggccactatccaggggagtgaccgatgtagccatcccggaatagtgacagggtcactattccatgtaaccccgttatatccagcctccgatgacatcaaaaacggcgttaaccacaccacatttcgcccaacgcaaatgactggcttggagacgtgctccaaccaactccgcagcctgcaaatacggctccactggcagttcatatctccatttccacaggatagcaatgatcgccaacaagcaactcgccgccttcttctacacctcgcgtggccgaggcctcttcagctgcaacttatgtaacagcgtgcgcaaacagttggctgggtcaggttactccaatctggtggcacacctggcatggaagcacgctggctacgaggcaacgtacgcgtcgctccaggccagctcggaccgatctcttcaagcgttcggcttcgtcgcagaggaagccagccatctcttccaatgggtccgttggatcatcgaacgcaacatgcccgtccacgaagtcgaagatgcaccatcagcaagctccgatctgtgaccgccaaggccgtcaagaagtgcatggaggggatcgcaattgaagtcggcgagaagctggggaaagagatgggaaagctcttcgccctgatgttagacggctggacccacgctggcattcactatgttgctctctacgccgtctacgagacagctggtaagctgcgcataccgctacttggtatttctccccttgaagatggcgatcagacggcagacgctcacatcaagctgttcaagaacatcctggatgtgtacgacaagaccagcgacatggtggggtttctggtgggggacaactgcgcaactaaccagtccattgcaaccaagatgggtatccccctcgtcggctgcgccagtcatcgtttcaacctggctgtgaacaagttaatggagccgtatggcgacttactggacgaagtcaacaaccttatggtggaacttcgtcatgaaaataaccgtgccgagctgaagaagtacaccgatctcgtccctatcaagcggaacgtcacgcgttggtcctcgacgtttacaatggtggaggggtacattcgtattcgcgcagagatcaagaaggtcgacgccgtggaggaaatggtcccaaccggcgggaagcaccggaagttggtcgcgctgtttgagcacctcaagaagttcgagagcgtctgtaagcggcttcagcgcgaggacgccgatatgggagaggtacgcctgatgttcgactccctcatcgccgagtaccctgtcatgtcagagcatctgaagtcgaccgccaagatcgtccatacacctgcattcgaatcgggtgttgtcaaggtcatctctggcacggctctatcgtccgcggagacagcagctttgaagcggttcgagcaggcacaacgcacaggaaagaagcgcaaggagcgggaagaagactacgcgacgatgttgctccaaggcaagggaaagaagaggaaacaagcgccaagtaccacacgtcacatgccgctcgtgaaaatggttcctccgacgtcaaacacggtcgagcggcttttctctcagtgcaagctggtattgacaccgcagcgtcgatctatgcttccggccaacttcgagcagctggcgtttctccgggtcaaccgcggcatgtgggacgtttccacagtagcccgagttagcaagcagcagggtagctaaactagcagcggtattgatagtggggagcgttctagctacataactcaataagaccatccctaacattgaagtttacactcctcatatttttagaatttttttaaattatgccacgacactaatactgtattttcaatccaagtcaaatcgtagttatgtaaccaagtatgtccgcttttcaacgcaggtattcccagcctcgacagaggcatattgatgaagaagatgcatttcatatcgagcgtatgcctatcttgacctatatccccctctaaaaagatatggtcggcccgaaataaataattatagatcaatccttgtttatcttcagcatacctttgatgagtgtaaaaatatactgcttgaaacactcctacaatagctagccaattagcacgcacttcaacacacgtctaccttagattattggcttagctagctatgcacttgggaaaaacaaagatgccgaagaagggcaagaggctcaagcaaattgccgctctcgcggcagctaagcgggcactcgaccggcaggcacgccaccaagctgttccagcccctcttgaagttctccgacaagaagcgctgtcgacgccatggtgctgttcaggtccagccgtggacgacagtgatacgtcttcgttagaagacaactcatccgacttcggcgaaggtcccaatctctacacagtagacgcgatctacgcgaaaaaaactaatccagcaggtgccgcttattattttgttggctgggtgggctatgcggagctaacatggcagcccgcagttgacctgcctcaagatctcatcagtgagtttgatcgtgctgagcttggtgtaagctggccggtcgattaccgagcggtgattccaattggggttcctacaggcaccagtggcaggggtagacttgctaggcgcaccatataaattgcaatataaattgcgggaatttttattattgtttgctaagaaattgcagtttttatcagtaggtgcaatccaatatgatactgtattggcggacctctgcgccggaccacgtacagtatttgatacatgaaataggtttgaggtactgtaagatgcctcatgtatcgttgagtcaaagacttcgaagatgtcctaggccaacaaatcgcggtgttgctctgagaaaaaagaaacgcggtgtaacagctgcggcgttccacgccattgactgctctgagagcacgaggaggaagcaatcattgtcggatcatacgagttcgctacacttgggtagccaacagcgacagacagccccagcagtagatgcagctaggtaggagtgcctcttcggcaattcgcctgcagctaagacccgcctctccgcatcctgaccggctaaccgcgggccccccacgcagtgtaagtcttataatggtaaaaatatgtccttgtaacggttagtgcgcccttcgctttggaaagaagaagctacgctctcgatattgtagcattgtctcaaatagtgcagcaaagttctcagggattcctcacgtgtgtttccaatcggtgacgatagaatggcttcttgtgttatcgtcatatgtatttcaaacggttctcgcaattcgagaacgccgtgatgcgctgtttctcccttcaccagacagtgaggatacggatgcatgcagtactgtaacctttatcgatttatcgatttacacctataatgcgtagtaaagcttgatacataacatgttgtgaatcactttgtggcattttccaacttttgtgcaataactcatgcaagaaaagaggtacacatccgaaacgccatcattcgcaaccgcgctttgtttgctcttggtttgcaacggctctgagccaagcctgtcggttcaacaaacacttgatagcaagatccgatatgtgaggcttggactctgctgtacagggcatgcagactaggtatcaaacagtagcggagcccactcttgtgccggacgaacctcgagagcatctcattccacaatttgcttcacggcacccgagcaaaccaccacagccctgcaaataaccccgccaggacttccgtccaaaacctcaagaaccgacaaccactatgcgtctcactttcatcttcgcggcggtcatcgcggcctctctccatgccagcggcgctgccctcccttcggccacggcatccaatatcgctgaggtcgagaacgaggcctcccctgctaccgctgattccgctcacgcagatggcgggcgaatgcttcgccgtgtcgagaagaacgacgagatcgatgaagagcgaattgactggtcgaaggtttgggcgaagctcacttcgaaaaaattcacgaagggtcagaacatgagcccaacggagcagcacaagtggcttattaggcaagcaaagaagctgggcatgaacacggacggcatgtagcgaggcctagtatgcacttccatcgcttgaatacgcgacagcgatgtaatacactacggggaatatattgctatcgttcagtctgaaatcggcgtactagagcttcgtgtaggctgggatagcttggtaagtcgtattacaacttctcaaacaatatcacgctggcggttgtataattgattagcaaattgcagtgtcaaagctccaaggaagctgtcctctactggcgcaatagcggggacaagaaatatacaacaacaaaaggcgttctagctagccctttgttaagcgagcaggagcttatatgtctcaatcttgcttactgaagtgcaccataggctaattctgaacttcgcgcatgcctcaattttcgtaaagtgtaactgcacatccaccagtactctgaaatagttcaaggcacacttaattgttgttgttgtcaaaacaataacgtgtaacctcgacaagaccactataaaaacgtattttatggtacactgcgttgttagcatgttgccacctgttcatactaccaaatgctaccttatcgattgatgcccgccatcgcccgcagaagaatagcagtctcgcagcaaccgccttagtcactgacaaggtgcagctatgagatcgggttgatgctcacggccagcattacaatgctacccacccagttcatcagttagccctagacgctgaccctcgaaattgctgcacgaatcaaaacaacgcagcgttgtcaccataaaccccacacaataatcgttcgaatgaacagttcctccgaaaagcacgtacgcgacgttgagcccgtcgtacgtctcacgatactccgggtccgacattcgatagcgcacgcgaccatgatgagtggcttcgatcgtccgggtggtatttgcgcgacaacttgcggtacctgcaaatgcaagtaaatgcaacatcaaagcattaaaactcttgatagggcccggatatggataatttcctgagtgcgcaccgttgcgttcttgtttttgctccagcagcagcactgacaggcaacgtgcgcaccagcagcctgatgggcaccagaatttctggagggcttcttgacgattgtggtcatgatcgtccgcggctacaatctgcagacccagttctacgacaaatataacaatactacaaaaatattagctccacattttaccatatatatggatatatacttctgatctctcaccaatagagagtagggtttgaattagaagttggagacttcgcctgctgcagcacaattcacagcgcggggccttggcgtgcgaaacgatctgaagaatctacaaaacatattgtgtttatagtgtaagtaaaattgtagggttcctaaataaatgttcttaacgatcggcaccttgtctgtgagatgaagctctagtgacttcgtgagtgagggcgagaagagcggcagcggtttatcagcagaacagcaagatccagcgtcttcaactctttctatatgtccaacacccatactcaatcgaatgcagagagctcgctacagcaaattcaggaatgagcggcggttgggtggttcttgttaagattgagagattctgacctgagaacttcaacgaaattcaatactcccatttaagtatctgcatttctgagtccacagcattatttgttttgaggttaacgttatagggaggcttcatctgatcggcttcaaacaatcggatgtgggctgcgctagcagctttactgctatcccagaataatccactgttctctgaaatttatttcagagtctaccggtgataccactttccgcgctaattacatatatcagagtttagcgacgccctctttgcttgaattgcatatctgctgtacgggtcacccatttcttaaacttcatattttttaacaaaaaactttatttatgaagattttatacaaaaaactttatttatgaagattttatacaaaaaactttatttatctcacccactcttgaacgcaatggacttcagactgaaatgctgaggcttggcaaggaagtgaacgatgacctgttcaaaatggatcaggtgcacgctgcgcggcaggggcaccgctcaggagaatgctcgagaagtacgggcgatacactatgtgttgggtgtgtacagttaaaatttaagaaaagattgtttaaagacacaggataccgatgaaggttgtccagagatttggagcaactgaaccagcgtgtttcgactcagtgccgaaagcacttgcgctctccgtcatattgtgtgttctgttccaaatttccgcgggcgcccgagccaaatctccggccaatctccgaggattggttaaaagcgcccgtttaagtacgaattggccttgacatgcgggcacttggaccatatgatttgggccaggagattaggcaaacgacttgagtgcaatcggagcggggtctccaaaccgccgcgatttggaaaattcggccggaattcacaatactaggttgcgcaagttaccatccacatttcaacaaaaaattaacggtcaatgtagtgacgagcaccaagagatttgtcagaagatggcgagcacctacgtaaagtgcaagtagcctagagcaagatgcaccaagaaagcgtgaacgtcgcaaacaaagtagcagacacttgaagctaaaagtgtggacttcacagccgaaatttcagagcttcttcgtgcacagcacgactttgtttgtttataacttcatactagtggagcattcagtcgcgttgttccgttgagttgctgagaggaccgactgtctgcggtggaacctctgataggctgcacaacttgccagacgttggccgccagctcttcgcgggcaaaatcgttatcgcagaccgatcccggactactggttctcgccgattttcatcgtgggcgctacggtccaacatgttgtcagagttctcgagcgaccgttacactcccgcccacaataagcctcaactggaaagtttctgcatcaagcaaggcacggctgcattggatttggtatcacgggccgcgattcacggtgctgggggtctactatttcgacgtttcgacgcactcgcgctgcgtttcatccggcacgagaagttcaagggcctttggaatttacgtgaatggcgagctgaaggactctgcgaacctcagtcatatattatgtcgttagcaaaatgtgttaagtaacatcgatgtacctcactgaaaactgaaacttcagtcctactgcaagcagatgggtactcggaggctgcgtcgatctacgaggcgctggtgttcgccgccgaccgaagaaaagcgcatgaacctggttggtacacgagacgctggagctgcttgaaatgatggagagaaatggcgggtaatatgtctgtggagtaaaagaaacgcgtgacgataggagtggaggtggtctaaaacccgagtactctatcggtttcacctccaataatctataggggtagtggacgacactgtcacaagcaagtcacaagcatgtaccttttctgaaatttactcgtgacagcaacatccgccaacattatgttcagaagtgacttgtttaaaatcaaaaagtaactatttgaaaatgaatacgcttgctacggacgggccagctattataggctcccgacaactatacatttaagtagtgacaatgtcgaaatcgatgcagttaaaacaactcttagagtacgttgtagaagcatgatatagctggcggaagttactagggctccgcgatgacgattaaagctaggcgcgcatccagattacttgtgggctcacccacgaacagaagactcaccggcaagacacaagcagccagaagcagccacaagcagaatcgaacgtgtattaagagccttcttagtgaggctctactcgtgtcagcctcactgcaaaccaaaataatatagcggctgtcgcaagccagccgagcgtgttcacttacagtgctagattgcagtgacttgaaacctgaagtcctcatatctgcttttgacaaactcaggaggatcgacggaaacagggaagtccgatgttgttgccgaagtcatcctgggaagcggcaactacttccattgggagttcgctgtgcggatgacgctagcgaggaaggggctgctggcacacgtgcagattgtgaaggacccggctgagatgaccaaggtctggctgctgaacgacatgaaggcgctcggactcatcgcccaaggggtggtggtggagcaccatacgaagattcggtccgcaacctcggccatccaagcttggaacactctgcgggagttctacaatcggacgaccatgcacaaccgcgtgacgatgactcgtcgtctccacgagttcaagatgggggacggcgcaacgatggcgaagcatctggacagctttgatgagctgatcgtgggtttgcaaaccctcggtgagcctctggatgaaagccgacagctcgtcatcctgctgagcagactgccggcggagtatgagttgattgcatcgatcgtcgagaacgccaacgagaagttgatcaaggagtacgagcgacaggagaagaaggagacctcggagcgtgcgctgaaggctacatcgttcggatgcaagggctcggaccgaaggttcggccggaaggacaacagtggacgaagcctcagcggacgaagcctcggtggacgaaccgtcggcgggccaatcggcggcggacgaagcctcggtggacgaaccgtcggcgggccaatcggcggcggacgtagcttcggtggacgaaacgtcggcgggcgaaacgtcggacggtttaaggtcaagtgtttcaactgtgaccaagtcggccacatgtccggagcaaagtaacggtggcaccaacgaagactcggtgttcgccgttggggaggatcgatcagctgggtggctgatcgacagcggtgcggcggcgcacatgacgccacaccgcgacgacatgttcgagtactcggccatggtgaaggacatgtacgtgaccatcgcggatgggaagaagattcgcgtggctgggactgggtcggtgcgattgacgggcatcgacggaaagcagattcgaatggtcgaggtacttcacatacctggcctcgaccgaaggttgctctcggtcggaaagttggctgagcgaggcatgagtgtggagttccagcgcatgtcgtgtgtgatctgggacaagtcgagggcgatcgcttcggggaagaagatcggaaaggcgtatgtgttggactgccatcaagacatatcgtattacaccgagtactcggggggtgacaatgagtgggagctatggcacgctcgcatgggacacccaaacgaggactcgtttgcgaagactcggctggcaacgacgggcgtaccgatgactcagaagaaaacgaagtctctgtgtggagggtgtatgaagggcaagtagacggtcgcgcacttcccatcgcgctcgcagacgaagacatcgcgtccactagagctcgttcacacggatgtgatgggtccgatgaagactcggtcgaagggtggcgctatgtatgtactcaccttcgtggacgactactcgcgttacgtcgtggtgtacttcttgaataagaagagcgaggtttcgaccaagttcaagtcgtacatgaaactctaccagaaccagtggggagggcgcattaagtgtctgcgctcggacaatggcactgagttcgtgaacaagttgatggccgagatctgccggcagaacgggatcctgcaccagaagacggttccgtacagcccgcagcagaatggtgtggccgaaaggatgaaccgaacactaatggagaaggctcggaacatgttgcactacaagggtgtgacaacgttgtggtgggcagaagcagtcagcacggtcgcgtacttgatcaaccgctcgacgaaccggattgcccaaacgaagactccatacgaggtctcgttcaaatcgaagcctcggtaggaccacctgcgagtattcggatcggtcggttacgctcacgttgacaaggcgaagcgcacgaagttggacgcgaagagcttcaagtgtatgttcctcgggtacgccgaagatgcgaagtgttaccgagtttacgacttggagtcgaacaaggtgcaggtatccagatcggtgaagctcggcgaacgtgaggtgaacggcatctatgagacgatggctaccaacgattcagtcaccatccaagtttcggaggacactgaggatgatgcgcaacttgaacaagctgaacaacctaccaatgatgagccgatggagtctgcagaggacgcaaccgaagactcggagacgcagacgagggctcggagcgaagcctcagttgaggacctgacaacctaccgaggagtgacaaacccgacgatgggagaggcaatggtatttcacccagctccagaacgtgtccgacgtgcgagggagcctgcgattctgcttggaaatggaccagcagagggggaggagtcgaaggttgacgaaaccgaagattcggacagcgacgaccacttctggccaccatcgcccaagcgtccgaggtttgacgagggcagcttacttgcggaagctgtgctggcatacgcggtagacgttggtgatgcagacgacgcaccaactacgtatgatcaggctatgcagagcggcgaagcctcggagtgggtcaaggcgatgaacgaggaactgaaggcgcactctgacaacggatcctggacgatggttcggcggacaacgaaagctctgccaatcggatgtcggtgggtgttcgcgaagaagcgcaacgagcacggccgagtcatcaggtacaaagctcggttggtggcaaaagagttcaaacagaggtttggcgtacgctcggttgtggtagccgaggcttacgtgaccgaacagttggatgcggacacggcatttctgaacagtgatctcactgagcttgtctacatggaggtgccgtatggcattacgaacgcgaggaacatgatgtgcagactcgagaaggcgatctacggtctgatgcaggcggcgaatgcttggcacaagactatccaccgagtcttcatgaacatcggatttcgaagttgcggtgcggaccagtgcgtctacgtgaagggcaaggacggcaggtatgtgtacgtatgcctctacgtggacgacatgatcatcgcggccaaaacgaaaaaggaaattgaggaagtcaaggtggcacttaagagctcgttcaagatgaaggatctgggcgaagcttcgtttatcctcgggatggagatccaccacgactactcgaccaagatgctgatgatcaggcagacgcgttacattgacgacgtggtgaagaggttcaaccagcaggacgccaaggtggcggaaacccatgtgagtcgggcatgaagctgacgaaggctcagcaaccgaagactccaaccgaactttcggcaatgcagccgagaccttaccgagcactcgtcggatgcttgttgtacatcaccacgtgcactcgtccggatgtagcttacatagtcacgcagctgtcacgttttctggagaatcccgggcagcaacattggaaggccgcgatccgagtactgaggtatctgaagggtacccgagaccgaggtatcgtttacaatggcaacgaaggcgaggtttcggttgaggcgtacacagaccctcgacgaccgtcgctcggtgtcgggaacgatggtgatgatcagtggagcgccggtgatcttcaagtcgaagtatcagcgcacggtggcgctaagctcggcggaggccgagtacatggcactcagcctatgttcccaggaggtgctgtgggtccgcgccatgttgaaggacttgggtcatgagcaagtgggagctactcaagtgtgggaggacaaccaaggtgcgatctcgctggcgagcaacgcaggctacaatgctcggacgaagcatgtcgacatcacgcattacttcatcagagagaacgtggcgcgaggtatcatcaaggtggattacgtctcaactaaggatcagcttgcggacatgctgacgaaggcggtggggaccaagcgcctgcagtatctactcgaagcgagcggagttatcggacaaagttctcaggcagaggcttcggaccgagacttcggccagaccgctcagcactagcggcgagtgggagtgctggcattgagcgccgccagtgcacgcgagagtgacgaaggtacgaccgaggactcatgcagagatgactacaaggagaacgaagtgacggcaggcatggcacgtgcctggccacgatgtgattggaccaaccgaggactaaccgaagtctcggttgggtataccatactggaatcaagtcaagtctggtgtgcgctaatcaatgtgatgagaggcaacaaggagagcaaggaggacaacagggagaggaggacaataaagtagatttaggcttaacagtaaatctcacttcggcatttgccctcttcaccacaagcaacagcaaaaccaacaattgcaatacagtaaataattgggttttccaataaaaatctttgttattgagtgccctcgtttccaatacagtatcatattgacccaattattgataataaatatgaaaaaagaccgctttcatagaagttttgactgatgattctagctgctaagggcatggatttgctcaacgccacatccaagcaagtatttcataccctaattactattatatagctatgcatgagcatatgttttaccattgctgaagctcgccggtagaaaacagctttgagcgaccgataagacaccgaccgctatcataatactgtgagcatacaacatgtacaacgcgtagattaagcctcaggtagtcttcatagtgaaagcttcactactaaaatttgaatatcaatgcgttcaacggatagacaatgtcaatgggcgtatagaaacttaaaacaagttatgttgaatacccggttcagttagttcgcaacattcaccctgcactcacgtcgtcattaatatccttgctcgtggaatgcttgtgaacttcacacgcaccgtatgttataaaggactacaggtatatttgaacaacatacatatgtgccacaagcatgccacaagcacacagtaaatgttcgtggcagcaatggcgccgctacatccgtaatgtttcggatagtcgctttttgcgattcgactaccgtatttgagatctcattcttcaatgaaattcattgaagtaaaataacttcatacaccatattcttgaagttgtgttgttgtattttgtctttgcaccatttcaccctttttgtgcatatttttggatctttcgtgccaaaaatgtgcggtttatgagccgcgtagcgcgcgagcgtaaaccctggcaaaacctaacgtagaacactacctgcggttttggatccgtgtacgtagcacgtgggcttaaacccaggcaaacgctggagtagaatactaccaccgacacataattaattttgaaagctttatctgcattttgcagtacagaattctgcccgaataaggaacgggtgtataactaatagcctcacatatttaatattattttccagtcgatgtggcgatagggggatgtgcaaggtactgcaaggtactgaggtgaaaaatccagtgccaatcatccaccctcgtttgaaaaatggcgcgcatttagcgatcttactagacttcaaactacatgtatcgtagtggtagactcgcactttttcttttgcacctcgccccacaagccgacctccttccccactccacccatgaagtccacaccgtccaagcgtctccgcctcacttggtctgagaaagtgggcatcctcgacaaggtgaagggctagataatccctacgaggtcggtctgttgacagcgctgttgtggtgcgaggatgcctggtcaaaggttagtgcttcgaccatacgccactgttggaatcattccggactcgtaggtaaagctgctcttcagttcattttgaaattactaaatcagtacattggaaaagtatactcaacttaacatcaatttatatattctgcgtctttatatatatcaggcgtcccttactcgggcagattactgtagttactttttgcgattcggttagttacaagaagctagtcgagaatgaaccctgtcgataattaattttatgcttcgtttgcattttggactagttactttttgcttctcgagtagtcactagtaactagtcgagaatgaaaaagtaactactcgaagcattattgtcgaaagtgactagtttaaaattaaaaagtgactagtttaaaatgtgcacccccgtagcaaaacgtgagctcgggccgcttgccaggcagaacattgctgagtcctgggtttgcagccgcgtgcttcgcacacggacagtcaaaccgcaggctggctctctgcgctcgctcgtgacatctgtccccgtgctgcctatacagttttccttattaaactccaaacccagtcgatttcaataaaatcggattgaaacccggtcgattttgtgaaatattgagcaacgacacgtggggtttgtcgtgttggctgctctacttgtccccgattgaagtaggcgtgcattgcgttgtagcttacttgagttttgtattgcatactgtagcccatatctaacggactctgtgcttgggcgcagagatcccgcaatcccaaatttcgctgagtgggcgagagctgcgttcgtggccatctctctgcgctctacgcaacaggtactgagcccaaccgtctggagctctgtgagcttaccctctagagcttcgcggtggccacgaggatgacgactcctccggcgagtggtgcagcgacgtcagttgcgggcaccccgtcgacgagtgcgcatggttcaacgccgagcgtggcggtaacctcgacgacggtgaccacgatggtgtctacggcgatggtggcaactacaggagctggttctagtggtactgtggctactgctgaatccgtgacgacgacaacggcggcaatgccgcacctccaaggtggattctcgttccctggagtggctacgagtgggttggtcccttcttcggttgtatcggtggctggtgttgcctcttctgtgcccgttagctatggaaacgcctatcctgtgatgactagcatgcagtacggctatggctacggattttcggccccgccaagtggagtattgccgatccctggagctcgcagctcgggaagtgttatcgctggaattaaggacatctcaaataaacccccagtcatgaagagcagctttgatttgtatgctgttcagttgaagacctctttgagtcggctggggctttggggcgtgattgacggcacggattcgcgtccgctctttgatgtcggagggcaagctgcatttgatgctcgtgacaatgcggcgcgtgacgcgatattgcgtggcgttcctgaagctgacgcggagatgatctgccatgaggcatctgcaaaagatatgtggactcgcttcgagaacaagcagacaaagcgtgagtacgccaactatatcttcgcacgcgaacaactgtattccaacaagtacactagtgatgtgaagctgagtgactggttgagggacatggagttgcagaagcgtgaactccagcactatggaaagatgattagtgatgaggagtttgcggagattctcttgagcaacgtgtcgcgcacgcaccgtgaggtagtgcggcagttctcacggcactatgttgtgctgactgtgcctggaactcaccagctggccccgacagcagctcaagtgatgaatgcacttcgtgccgaagaagatctggatgagaagatcgctgaggaagttcctcgctcttccatcagttctgcccaaaagaagtcgaacggcggcaacaacggcaaatctgccgagagttcgggcaagaacaacgccggaaaaggaaaaaggcagcgcgggcgtggtagatacaaatcgaaaggccagaatcaagaaggcaagtcaaatgctggtagtggcagcaagtcttcgcaaggttgctggaattgtggcgacttgaaccacattcgcgcaaactgtccgactgcaaagccgaaggaaggctcgcaggaacagaagcagcctgtaattagcgagtacaagcgatggcaaaacaagaaaggtggagatgcaaagaggagcatcgatgcgctgacggtgcgcaaggtcggcgcgactgcgattggtgctcgtccccgtaagactggcattacggagtgggtgctcgatacagctactgatgtgcatgtatgcacggatgtgaacttgctggtggacccgcagcctgataggcagcatctcttcctggattttgatggtcaaccaaaaggagaacgattagttggtgatgtgcgcattctgatggataatgagatgacaaaccaagatgaagtgttgattttgattggtgctgttcacacaccgactggaccagacaacttcttgagctctcaccttctggaagaagatggctgggaaatgagcttcaagcgtgagactggagactctttctgctgtataaagaagggtgatctggagctgcgattgaagaagacgcgcgggcgctaccgcttgcaagcgaggcctgccgatgcacgagacgtgcatgctgtttcgcaggctgctaacagtaacgaggatgcacttcagcggtggcacatgcgtttcgcgcatctcaactatcctacattgtgtcgaatgatttcgcaggagtctgcatttggttttgattacttgtgtggtgctggtgctggggaccctgctgaaagatgctggtcgtgtgttgctgcgaagcaaaagagaatgtcttataagaagacgcttacgcggcgagcgacagacccctaccaaaagctgatgtcggacatgtgttatgtgggtgtggacacctacgacgtctatcagcatttccagctcatcgtagatgaagcgacacgatgggtgggggttcctgatggaggctaaggaagaagctacaggtgtagcgatctcccatgtgatgtggttattggctcaggggcatcgcatagaagtgttctcttctgatcaaggcagagaactggtgaacaaaaggatgaaagcatttctcagggcgaaaggagtagagtttctgtggacaaatgcatacagtccggaggagaacggccttgtggaaaagatgaatggtgtgttgttggtgcgtgtccgtagtctgttgacaggccactcgatgcgctaacattcaccacttccacagcaaacgtgaaagcttcaccccacaagctctccggcatgtgagcggtcttggtggagacaccccgttcacgcgacgttttggtgagggacctgacgttgggataatgcgtgtgtggggctgtgtggtacacgagttcactcctaaggtgctacgagctaataaacttgaaaaccctggcaagttgggcctctttctaggatttgcgaagaactctgaggggtatcgcattctgaatttacggacgggtgatattcgtgagcgacggtctgtcgagtttgatgaaggctggactgtggagtgttcctacgtggagcatctactggcaaatcgatatcggcgtggccgcttcaatctcccagcttggtacggctcccggtcatggcggcagtcactcatgacgagctgacagcgcctccgccgaagcgtcaacgtctcgcaagtgcacatggtagtggacgacctagtggtgtgggggagcagtctccggttagtgcggggggatctgtggctgaaccgtcgaacttgactccagcgcgagtgcccttggcggacgctcagctgtcaccgtttggtgaaccacagcaagaggtcgagtgcttggagcacgaccaactacacgaagaggaaggtgatcctgaggaagctgcgagtgtgtctaaccgccgctcaacgcctaggcgggagctcccggatcctgttcaagagcatgttgtgaatgacgaagatgcacacatcgatttcgtgactgcttttctcaatggcccgatcgactgcgagatctacatgaagcagcccgagttcttcgacgacggaactgggcgcgtgtgcagattgctgcagagcctctacggtttgaagcaagctccgcgcatctggtacaagacgctggataagtatctacggcagtgtggctttcagcgctcgaagatggacggtggtatctactttcggtgggtggatggaagtccgatctttttggctctttacgtggatgacatcgtgatcgcggcaacgatcgagaacatcaagcttgtgatgaacgagcttagcagaaagtttaagattaaagatctcggagatgtgcatcacctgttgtcgatggagatccgatatgtccctggtaagatgttgtctatctcgcagcgtgggtatgtggcgcagctgctggggcgctttaagatgtcgaagtgcaaggcggtggcgacgccgcaggtcaagggcaacttcccgctcccgggcgacccggacaaggagttggtgtgcgtgaacattgacccggacgtggactaccaaagcatcgttggatcgcttcagtatctggtcagctgctctcggccagatattgccaacgcagtgcgaacgttgggcaagttcttgatgtgctacacgaaagagcacttcgttctggcgaaacgtgttctccgatacctgcagggtacgcgggagcacggactggtgtggtacaagccggtgtctccggagatgcagttagtggcctatgcagatgctgatctcggcaacgagaaaaatgatcgtcgttctatcactggttacgtgctacagctcaacggctgcacgtttgcctacaagagtaggaagcagccgatcgtgaccgacgatacatgcagtgcggagtttgttgcagccggtgagtgctccaatctcatcatgtggacgcacaacttgtgcgttgagttgaagattcaacggacaaagaagacgatcctctacgaagacaaccaggcagcgatccaagtgatcaaggaggtcagcagtggctacaaggtcagatatgtggacctgaagttccacaagatcaaggacttcgtggagcgcggcgtgttcgcggtcgagtacattccgagtgaagacaatcttgcggacatcttcacaaagccgctcggcccgcagcagtttgtgaagctgcacgagcgcctcaacgtgctgcccgtgccggacagcgagtagttgcgcacggtaagcacgtgctggaagtgagtgcagcaacacgaagtgggagtgtgaagtattgagcaacgacacgtgctctacttgctttgcgttgtagcttatttgagttttgtattgcatactgtagcccatatctaacggactctgtgcttgggcgcagagatcccgcaatcccaaatttcgctgagtgggcgagagctgcgttcgtggtcatctctctgcgctctacgccacagatttcaataatattcccacgggtacgagtcgcgttacagcacctttaatgcgacagcacaacatctgctttaagccctacggcgccctaaagccaaaaagagggggtgaatctgcggtgctgcagtgtactcactgcagcaccgcagattcaccccctctttttgtgttggcaaaaaaaaaatgatttaaatatttttatcgcttataaaaatccataaaaatatttttcgattgttattcatataagtgcgatttctgttatccttctttttgtatagacgaaaccgctttcattacaagactgggttctctattcgggcacctttactgcaagcgtgagcactgacacgatggcatggccgctggcaatctctacagcagagctactgtcctacagacgaatccagacgaagacgctgtcgatagcgtcgaaccgcccaccaacacgatgccacttgactcatcccgctggcaatgtcgcgtcgccaccatcaacgacagacaaccccacggacaagctgatgctgccagccaaagcagcaccgccagatccagacgccgagtctgacgaagtccacacgccgcccgtcgccgcgccggtcgtactgtccagtcgcaccagcacaatcagccaaagccacgtcgtgcgagctgcgagcgcaccgatccgtgagcacttgacgcctcgctgccaactacgccgaccaacccgctcgactgtgttgatgagcgccagacccgatcaagacagcaccagccggaccggtttcgccatcagcgactctgtgccactgctcacggatctcgcgccgccgtcagacacgagaacttgcgccccagactcgcctccgccacggacgaacaacgcaaacggcgcgcctcgaagcaagagactcgaggtacattggcactgtgatgccgctgaccgcttgcccctcaactactgcttgttgtctacgctaagccgcccgcgctcgctgtgctacatgtcgcctgtgctctgattgtctgcagcgaggatacaggctactattagcgcaactacggttcctctgcagctcccggtttattcgattaagcgggatttgctcgataaaaatgtaaaaatcggataaaaataaaatattttattttattttattttattcggataaaaatccttcgatattgtttttgccaacactggtgtactggagcagacatccgcaaataagaaaactaacaccgagtagcggcaacgggtccatccgctggaatgcctggcggtgggcttgcctccgcaaatactgcgcagacctgcattacgggcactccgctcaggtttgcttgccgtggcaacgtgtcctcacagtacacgaccagatgagcccatgacacccgccccgctgctatccgtaaatacaaatcccttattattccgatctgcgtaaagatttgcttctgtacacagactttgcacagattgctagggcgcccttaactttacggcgccattaaagtgtaggagggatgacctccaggcctgatggctttggaaatgggcaccccgaaggagtccctgaggaggcggaggtcctgaaaaccagctgctttactaatggcgcccaaggcgccattaacggtgctgttgtgctgtcgcattaaaggtgctctaaccacctcgcctggcttgtgaagttcacagtgaacgggcgggtatgggtacccgatcaacaccgtttgcgagccctgatgtgcacatccgatatgtcatcatccaggatcgcgctgtgattggcgaacaatgtttgctctttttttcgatagctctgggaccagtctggttggctcaatagtgactcactattagtgagatacgatatttgagactcggactctactgttcaggtatgcaacagactattatacggtagcggagacactattgagacggacaaacctcgagagcatctcattccacaatttgcttcacggcacccgagcaaaccaccacagccctacaaataaccccgccaggacttccgtccaaaacctcaagaaccgacaaccactatgcgtctcactttcatcttcgcggcggtcatcgcggcctctctccatgccagcggcgctgccctcccttcggccacggcatccaatatcgctgaggtcgagaacgaggcctcccctgctatcgctgattccactcacgccgatggtggacgaatgcttcgccgtgtcgagaagaacgagatcgatgaagagcgaattgactggtcgaaggtttgggcgaagctcacttcgaaaaaattcacgaagggtcagaacatgagcccaacggagcagcacaagtggcttattaagcaagcaaagaagctgggcatgaacacggacggcttgtagcgaggcctagtatgaacttccatgcgcgacagcgatctgcatgggctggaattacctctctacagtaacatacattcctaccgttcaagtctgaaatcgttaatgatccactgttcttataactattaagtagtataatacgtagtggagcatcggttgagtatcgacaccctgcagcggaatctccactccaaaccgcacaattggtcaggcgttggctgccttctcggcaagcttctccgtgctggtctcgggtaacatcatcctcgccgacttgatctcggactactgggtccggatgtactggttctttcctgccgatccaacacttatcggagttctcgagtgaccgctacatgtacacccccgcccagagcaagactgagaacgcttctcatcaatcgaaaggcacgggctacatcggattaggcatcgcggggctacttcgcgttcacgcgagcttcgctgcctgtcttaagccagccctggctggcacttgccctcgtcgttgagcatcttcccggtttatcagactttttcagagctgtgacaggactgggctttccctttaactcgaagaccctcttttggtcaataccgtcgttgttcttctcgacgcggcgcaggacccatccgccatccgcggtagcaggtgacgccccgtttccgagcgcaacatccggcgctttaaccgaacgggggccactggcatgaagagtggccgcaacaaccactccgaagatgaaagtaaggcgcatactggctgtcggttcttttgagctcgtggtatgcacgacttgctggtgggttatggagcgaatggtgtgcgggcttgtccagcacggaaggcggtattgtgcgctgcaacctgatgactctggtccggctactaacggcttctttagctacagtagtgccaaataccatgctcctgcaacggaacggaggactatgatcgtggttgggatttgggaatgagtttactggtgtttacgtttatggcgactttttttttaaaaaaagtctccaagagtgctcattctgggaaattcttgcaatagatagtcgtccgacaacccgtgaaagttataccacccgacgaaggccggatgtgggaagtcacctgacaaaaagagtgtacattacattgcttacgatgctgccgtagagagcaagtcgtgatcaagtgggacaacttgtcccacttgatccggacaagcatccctgcagtcaactcaaaagcctttgcaaactggcattaagcttatcacaagtaaacacctaacacaccgagtgccgttcggctcctccaacccacgtaattatctcttgagatggctcacatacttgaacgtgaggtagatggctgtctgcacgacgagccaaatgacaccagtcccaccatgaagttgtacttgcgctccggccggaagtcgtagatgctttcgatgtagtgcgccgcagtcatgttcgtaatcgtgttgcccgaagtcaccgcgatgatgtcctggttgtcgccgaactgcactcccatcagcgccgccagtgagtaactcgacggcatcagattggaataattgggcaaatttggccgggaatcacaatagtgtgtattagaacacgcgacagcgactggaattacttctctacaatatcgcactacaagcaattcattcctatcactcagtctgaaatcgtttaatgatccatatgttaagattgaaatagggggtatcggatagtctgcaactaatttgttttgctctgtgacgttataaaatgatgactgataacgttgcaggaacgccttccgcttttacggcaacgttagggccttattgcgacgttattagcaacatgggtacatggtaggacaaggtcggacttgtaatttatcggataaattcctcgtgtgttgcacataggtaatttatttctgaggtattatctgtgctgaatgagtacatagtaggctcacgaggtgtgcaaatctatcgagccgctcactgaggacttcagatgtgagggtgggagagttctgaagtggcacacaccacgagtacacttgtgagcgcaaagtatgctaacagaggctcaaaatgtgaatactctggtgttcggattcatttatctctgcatggtacgttttatcgcggatgccaatgattttctgggctgtacttcttcgacaacgagacatagttcttcttaaaagagtatataactaatcaagagctcgtaaaagcgtttcaaaagtgaccattatattttttttcgtaaccattaacgttgcccttttgataacgttgctctcgcagtaacgttgcccgctaacgttgcccttcgatcacatcgcccattaactttcttcgaggtaagttgttggtgacagtattgcacggcagcaaaccctactgataaatcaagtaacatatcaggtccacgtcgctggttataacattatgatattgtgagtgtacggacactttcattatgcattcaatgctgtgccatcgtgcattgactagtttaaaattattctcttacaaactagttgacctcttctcagaaaatctggaataatagtagacgctgaagttccgcgtctactacggaagttccgcgtctactgtataaagtcgtgtcagaatctataaaataaaactattaggtgcacgtctattaccttcggttactattcagttatactctcattgtctccgtcttagtacatccgccagattatcaatgactacattgccaggttgcgtgtacttcacctacaataaataggattcaatattttaacagtatgaagtgtaaaaggcttagtacgagcggtacaaccgtcaatcgcgcatcataattgttaggtaaaaccagttaacgttgcgcaagaactattaaagctcgtagctaaagggttaacgtcgctgtaaatttggaacttaagcagcgtaagacttgaattgctgcctgttgcttagccgataaaccatagctgttcatgcttatattttacgtattactgtgtacaataactaccacacatcgacacatgcaacaaatggacgtagaatctattatcaaactcatacagggtaacattttcgaagtgatgcataaatgtatcgtcacagttaatctgccagaagggtcgcaggttctagccgacatgtccatgaaacagattcctcatcagttgtgtgctgcaatttaatagcagtgatatcaaagtagattgcgatcttgttctaaatcatacggtatacatcgctgttttcttacaattggactctatatatctgtaggcatagtatgcagatgcgtgatcctgcctccatttaatatgcttctgtagtagtgcggcctgtcacgtggccgacagacggcagcagccgcgcactcgagtcgtcatcgacttgacgaacgagtgacgaagaggacgatcagccagtcggggcgcgaagtgtggcagcggcagttggatggtggcggaggtgagccagtgggctggagacaccggctacgggcggtatcctacaacttcaaggccagacgtcggccatgcaaaagatcgcaggagggcggacacggagaagagtgaaggacaagtagtatgcagagaggagaggcgacgacagagcgagtggcgtgcggctgagagacagcgagagcagataggttacgaagggccctctcgtaggtagaggataggaggcctcgtaggtgggggcaacgagcgcgcggctggccgctcgaccctcagttaagattgttcccggttggtgagcagttaagactaaatacagcaagagagtggcgccgtacgcgggttccagtaaagctaaggtgaggcagagattaggacgattggtgcacgatgagggcgtaacacagtagggtggtggggactgtggctagagaccacaggggtcgtggcaggaagtgcgaagtctgccatgatcgtaagggcgaaggagttcgctcgccgcactcgggcttgagctcctgaactcgaagcagatagagaaatacggattacctgcgggacacagcccaaagaccctatccgggggtgacggtcgccgataatgtgtcctccccaccgttcctatccgaaggacgtctggtccgacggccagtagctgtctggtagtgttgacgtgtctgcctcgcactttgatctctctcgctacgtccaccgggctacctaggtggacgcactactctcactctggctgctgaaccagccgacgtgtaatggaattggcgtggtggttcgggaactagctacacttcctatactacgcgctggctaagtcaccgtagtgctatcctctctcattatagtaaagtattttgccaagttttatagcgatcatgtaccgtacgccttggggaaggcattgtaccctttgaacactagctttatataagaacagagggacaaatcacattaacgggcgatgttaacgtgcaacgctaaaaataaagcaacgttatcttggattaacgttaatgcgcaacgctaaacataacacaacgttatcttggagcaactttaatgcgcaacgctaatcataatgaaacgttattgagaagcaacgttagtactcggtagtgtcgacctcattcgattaaacctaagcgcttgggcgcaaatgcttcgcaaacgtttaggacgacaatcgtataggtgtacggaaaattacagaacataattacaagcaacgcgaagcagcagccattatgtcagggacctggacgatgatagtggtttggtaacatcggtactctgctagatgtggacttccctctcggcccgcacgtccttgtcgtcccacggcgcgcagcttgaagctgaataccaacgtcaaaacaacatagtgacataaatattaatgaagcagtgttatcaatcatagagcgacattaacagacaatagagcgcagagcaacgttacctttagtattcgcgggaggggggggggcagactttcgcagcttgaccatctccgatgccaatgcgttcagcttgcccgtacgaggcatcctgccgcttttgccgcctccttaacagccttaatacattaacaaataaacaataacaaattaccaaagttaatgcatatataacaagcaacattaatgcacacctgtaagaagcaagatcaaacttacgtaattcgtgaagtcgcttggcttgccccaccctttaacagcgggcgcgtagggctatcgtaatgtttccaggaggtggctgcgcggtccgatcctaaagtacagcttctttccgtttaagttcgaaattaatcgaggtaaaccctcccttcaaatgagtattttaatcctgagggaaaatccggccggaatgagggatttggttgtcacgtattttacgcgtcatttattttttgggcgacgttattcttgttattgcaacgtttttgagctgaggttagggctagttagcgtcggaggacccacttcggacaaaatactaagaacacacagggtgctctagttgaggcacttatgcctctttgccacaatccggagttttgaggcgcatcacttctcgcaatttgaggcaccactaggggtttcatacaaatctaagataaatggcagaaaaggagtgcctcgcgggcgcctcaaccaaatgcatatgcttggtgtggtacacgttaattatacatgccacacgcttgttggcatcccgctgcaggcatgtcgaccggcctgcagattttctatgaatcacttacttcttccatgcattgcactaatgcataatttcaactacaacacacagcctgataggtggcacaaccttgattgcaaccaacgttgaagcttttgtttcgctcaaagattttgtggcagcgccaatataagtcactagcttgggttgtaccagtttggcccatgtaactgttgtcttattgcttgcattgcattctattagatttatgtcctaagtaatgccttaccgttagggtactacgcttttttctatcgaaaaatgcttcaagtccaaatgtgagttttgagtcaccctccggaaccttgaatgagacgctcggtgttttttctgcacacattgccacatctagagcaccctgagaacacacttccattccagtgaaaacacacagaggatgggcgacatcataaagtagacgaggcgcgatagcgcccagccaacggaggcgagcggttgcgaggagcgtagccgcagcaaacccgcgcggggagcctgcgaagcagggccgcgcggtatttgcggaggcgggcccagtgacgagcattccagcgagccgagcactgcactcgccaggtgagagaatctatatatcgcgagcgaagcgaacagcggggcgccgaaggcggtgcccagccaagcgcagtgcggctggtccgtttatgaaaacgcgtcatccctcccagtcactatagtaaagccaagtcaaaaggatttgtaggatttgttgtgtgttttcactgcatgtacgtgtgatttgacggttctgtcgtacgggttggggtgacgccctcccgcggcgtcgttctcgggggcgctaatgcggctcccagtctgggagtcccagacggacatttatttatttatttatttatttatttatttatttatttatttatttatttatttatttatttgttgcggtttagtccgatactgcgctctgctgcagcctcgccagacggacaaggatgtgaggctacagtagtgtctctgggccgagaactcgacgcgggtacgactcgcagaggcggtagcgaacgaaccaggcgcgctcagtgctcagccaccgacttcccgtgggttgataactacggcatcgcccaggaagctgattgggcggcgaggcgcgagcgcccgcgaggggggagattgctgcggccgtcaatcgtcaagggaaggtgctcaaggggatcagcataaggcgcaggaacaacacaagaccgacgaacaagggcgttgttaaaactcagttttggttggtcaaacttaagctttatttatctcttaatgccctctaatagactagtgctcagtcgttggcaaaaggagaagtgagctctctccgaatgccgtcaaacatcatcgcacgagcggtcgccaacagggcgccccctgattggctagttatgtagtcctatgattggctctctcttaaccaatgggagagcgccttaatgccagcgggaacactttaccctcaagcggtctctcggggacctcattctaacaggcgtgctggctgagactgcgtggtttgttgcggccacgacagcagttgccggggaaaggagtagtgacccgaatacctagctgaatcaagactacaagaccatcgcaggcaatataacgctgatacgccggcgtttggctcgtttggtaggcgaagtttgatagaattatcaactacctataaacttgcaggacagaggagtattgatgaagcactagtttttttattttattttttatttttcattgttaacgccagtcacactggcgattaagcacaacttggattggcaaagatgtagttgctcaacgcctaacacccgataccgtacgtaacagtagcttacaattccctcgtcaccataaatatctgtatgtgaagtaggttagcaaattccgtgctataaggccctacactagtcattcaaactgttcctcctgatgccaagttttgccaacctcgtggcatcgccatgaagccaaagtaaacgaccaagctggttgatagccttgtcgtctctatggaggaacctactagtgagcgaggtcctttggatatggggcatctggtcagtacattaattccggtaaggacactttccattatagttattgttcgctctgctacaaatttcagagcttcttcgggccccgcacgactttgttttctttgagtaattgacagaattatgttcatcaagtacgatctgggcatcctacgcgggccgatgactgcgactaacttttgtgaagttcatctgatatacaacgtgtgcccctggtctctacttcgcctgtgttcgcactgttaccaattgtacttggtttgacatgtcgagatcattggttactgatgttgaagttgcattcgaggttcgctgtatgcatcacacagggccgactactgcgtctgcagccgtgtcttcggtattatcgatgtatctgagccgctgtggtcgttacccctacgagtaacagcctctgggcggcgcaggttgaagtgcccaaccttcacatggacaagaccaacaagacagcgccgatgttccaacaccctctgctccacgtcataatgtaagtaagcgataacttaggctcaatatctcgggagggaatctaatctaaatgatgaaggaggtggcggaagtgagtgatgcacccttcgagtcatgaacgccatccagtattgacagcaactgcgcagtgacaaccacagcgaaaggcgtcctgtcgagatcaacgcgagatttaattgcagcgagatccagcgggaactcgatcgtggctagttatcttctcgctagttgcttcccgggagcatcggctaccaaaatgggtcagacatgtagccacgttgcaacttgcaactcgcaagtgtggtcatatcctagcctctactagaggagaggtctcgacactccacattaccctgctgtctctttctgtccacttgatctcactccccaaccatactcggtggggctgacttccgcgacgacgttgcggtcagcgaggagctctgcgatctggcggcacgtccgtccacggtggactccacgcgatgtccaagccgcgtctgacgcctaacgggctcggccgtggacaagaatccgcagggcgcgtggcgccatgggctttcgctttcggcggatattacagacatgtactgtagttacaaactgcaaacggataccgagaagttggctacgccattgcttcgcggtgatcgctgcacagttggcatagcggcaacagcagctgaagacgaaaatgctcggctgagatcgtgtgatggtcagcccgtgccctccctcggcaaatgtcctcaagcacttccgcccttcaaacatatctagactaaccctctcgtatccaggattgcccggcggctcatgatccacaagctgcggcacgacgccacgaggggaacggagccctgcagctctatggagagagaacagcaaagcacgccggcacagaaacgctggtgccacgaaacgacgtgctcgcggcccagacggccggcaagagagcttcgactcgagcgatgcgagccggggagcctcatcttcagcggagctcaagtgttcggaccctggctggacggacgggtaagttactctcacttccagtgccttggggagaacgcgagaaaccgcagcaagcagcaaatacgctgcctgctcaccagacggcctcgcgaataataagctcgcgttagtctcaacagggcaaccgcaacaactccgcacagaatccgcttggtgtaccgtacgtgttcatctgactttaggggtggggaaaagagacgtatcacccttatatatgagtcttcaaccccttcttcagagcgttatcgtccttatcgcaccttaaaaaggagtgcccgactggctacttttttgccttttcaactgctggagacgatgtcacgcccgacatggagctcagctgtttgcagcgcattccccctcttgcgttaggcattgaccagcaggcgaggaaaggccagcagggcacggcactttcaggaatacctcagctgcgcgcactcgcccccgcttgcattggcctagtgactgggatctctctctccagtgctgccgactgcgcctttcccgtagtacagtagcggagacgtcgcgggtgttccagtgcccgaaatgcctccttccaatagcgaaagcgtcggcagctcgaccatgtccaagtacgtgaccccgagcgtcgccgtgggggctcgttgctacatcccggacgaagactctgcgtggctgccggtgtacgtcgaggaggtgaacgagcaaaagggtctcgtgaccgtgaggatccagcggccgcgaaaggatcagcaagacgaagacaccgtagatcacgatgacgccgacagatccggggagagtcgcgtcgtggccatggatgtcggcttcccgctgcagaacgcgcagctttcgcgctacgacgaggggctggacaacatgatcgacctcaaccacctgcacgaggctgctatcctgcgcaacctcaagaagcgcttccgagctcggaaaccgtacacgtacacgggggatatctgtctggcggtgaacccttatcaatggctggacgagttgtacactcccggacttcacaagaaatacctgcaggctcggaagaggcaagatctgccgcctcacgtgtacgcggtgtctgtggctgcgttcaggcatatgtgcgataatggcagcaaccagagtatcctcgtgagcggcgagtccggcgcagggaagaccgagaccactaagatcctgatggataacctggccaccattgccccggcaccgactacgaccgccagtgaccaggaacacagcattactacgcgtattatcgaagtgaacccgctgctcgaaagcttcggtaatgcgaagactacacgcaacgataactcgagtcgcttcggcaagttcacgcagctccagttcgacaagaatcacgccctgtgcggtgctcagtgcgagacgtatctgctcgagaagacccgcgtcatctcccacgaacgcggcgagcgcaactaccacattttctatcagcttctgcacggcacgacggacgaggaacgtgacgcattgggtcttggcgacgagtgtccgaagttctcgtaccttgaagagaaggagcctcggctggaggtacggccaggacggaaatcgagaccgagtgcgcctcccccacccaagtcggcgtcagtgatcgaggcggagaacaccaaagaccgagcactctttgcgaagaccaagcaggcgctctctctgctcggactcagcgcggaccagcagaacgcgttgttccaggtgctgtcgggtattctccacctgggtgaggctcatttcgttccgcagccgggcaacgacgaagcttgtgacctggaccaggattccgtgatttattcgtgtgtgctgctggggttggacccgaacaccatgggcaaagccctgactcaccgtactatgaaggctgcgggagaagtgtacctggtcccgcttacggtggagcaggcccagtccggacgtgacgcgctcgccaaggccatctacgccagcattttcgactggctggtggctggtatcaacgctagtttgggtgccgccccacgaatgactgcgaacaccatcggcgtgctcgatatcttcggcttcgagagcttcgagtacaactcgtttgagcagctctgcatcaactacgcgaacgagaagctgcagcagaagttcacacaggatgtgttcaaggccgtgcaggaggaatacgagcgcgagaagatcacgtgggcacacatttcgtacgcggacaacagcgagacactcgcgctcattgaaggccgcatgggtgtgctggcgttgctgaacgaggagatcgtgcgtcctcgcggtaacgaagagggcttcgttagtaagctgtcgggtgcgtacctcaagcagaagaacctcattgagttcccgcggatctccaagacccagttcgccattcaccactacgctggaacggtcaagtacgaggccacgggcttcttggagaagcacaaggacgctctgctctcggacctgtcggacctcatgtgcggcagccacgagccgttcccgcagatgctcttcaaggtcagggccgagatggaggcggcggctgcagcgtccgccgccagcttgaagcgctccacctctggaggccgaggagctcgcggaggctcgggcggcgctggcggcgacaagactgtcggcatgcagttcaagcagtcgctcaactcgctcatgaccaacatcaacgagaccaacgtcaactacgttcgatgcatcaagccgaacagtgccaagagctccacgctactcgaggacaagatggtggccaaccagctccgctgcgccggtgtcatcgaagccatttgcatcgcccgcgccggatacccgaaccgactgctgcacgccgagttcgcggagcagttcgatatcttcctcaccgagcaggagcagaaccgccagaaggaggacccggagcagtacggcgcggctcactgccgcatcctggtcaagaagttcaagctcgagatgcccgaggagtaccaaatgggcgtgaccaagatctacctgcagaagggtgtgatcgagaagtgcgagcacatcaaggcgcagaagctcttcgcgtacgtggcgctcatccaggcgcactggcgcggcatgcgcactcgctgcgagtactacgagatgcgcgacgcgttgatcaccatccagcgtcgcgccaaggtgttcgtgacgaggtgtcgcttcctgcgcgcgcagctcgccattgctctgatccagcgcgtgtaccgaggatacgtcggtcgctgcgagttctacgccgtgttgagcgagcactgcgcgcttcagatccagcgcgtgtaccgaggatacgtcggtcgctgcgagttctacgccgtgttgagcgagcactgcgcgcttcagatccagcgcgtgtggcgcggacaccagggacgcaagatccgcttcgccgcgctgtgcgagctgcgcgccacgcagattcagcgcacgtggcgtggtcacaaggggcgacagatctactttgccgtgctatgccagactcgcgcggtgcggctgcagtgcttcgctcgtcaatatctcgcgcgtcaggagctataccggcgtcgtgccgcgtacctcgctaagcttgagagggaggagcgtgaacgcgtcgagcgcgagctggagctggctagacaacgcaagctggaggaggagcgtgagcgccagcgcaaactgcaggaagagctggccaggctggaagaggagcgtcggcaggaggaagcgcgccagcttgagattcttcgtcaggagagcgcgctgatgatccagcggcaggtccgtgggtacttcgctcgctgcgtgtatgccgagatggttcaggaggccgaggaagaggaacgccgtcgtcgtgaagaggaggaggagcgtgagcgcatccgtctgcaacgcgagcacgatgagcgcgaggcccggcgccgtgcagaggaagaagcggcgcgcgagaagcaaaggctggcggaggagcgcaagaagaaggcgctaatgatgcgtcagcgacgcgaaaacgcggccatccgcatccagcgcacggttcgtggccaccttgtccgtaaggaattcgcagcgctgaaggctgtcttgctcatccaacgcgtggtccgcggtcaccttgccaggaggcaagtcgcgatgctgaagggcgcggtgctcatccagcgcgtggtccgcggccacctcgcgaggaaggaatttgcagccatgaaggctgtgttgttcatccagcgtgtggtgcgcggacaccaggcgcggaagcagttccacgtgatgaaggaggaggcccgacaggaggcggaggcggcagctattcgcctgcagagcatccagcgtggccgcttggctcgccagaacttctccaagctgcgcatcgagaagatcgagaaggacgagagggacggagagatcaaccgcgtgcgcgaggagttctccatgttcaagatggagaaggccgagcaagacgacgagctcgtgcgcatgcgggaggagaacgccaagctgaagatgcagttggcggagctgcagagggccaacaaggagctggaggccgcggtggcggagcaccgatgcgatcgcgacgtgatcaaggcctccaacaacctcaaggagatcgagctcacgcagaagctgaccacgcagcgcaaggagctggagacggcgcgcggcgagtactcgaccctgtgcgacttcttggagaagaccggcagctctcgctccacggagccggaagagctcaactcgtccgacagctcgtccacctccggcgacgacgaggagaacgagcactggaaggaggaccgtcctaccattgactcgacgactgcgtcctacttcgagggtgaccgtccgtcccacgacattgccaagctgctcggaagcacgtcgcggacgtctcgactggcgaacgccatgctgcagcgtcgtcagaaggcgagccaggctgtggcccagcgcaagcagcaagctgccgccgcgatgcagcaccgcaaggagcaggcagctcaacgcaaagagcaggcggccaagactccgaccatgcagaacaacgccaacaccgccacgaaggccaagaagtgggtcacgctggcccgcaagaagaaggccgagtctgtcaccaccccgattgaacctattgagtaagtacccggtcgatgggaccaagtagttgaagactgcagcggcgctggcagatagacgtcccccacactgtcagccccaggcagtccgtagtatctattacaattcacctcgtaatgagagagttttgaacacataaaccttttggttctcgacttcagaagtttacagtactaggaactcaagctgactgtggccttctggtaaacgccctcgctatctgttcgcgctgcggttcatttgagaaggtccttacagtaagttgcaaaccggatggagtaaacagcagatgaagtgccccatggtcgcatccaagcagaagttcgtcgcccgtggtaagataagatccgatcacttgcaagttgcacgctcgacatattttgcatgttgaagcaagtcgaacccattacgattttccagcgagcaagtttccttccgccatgaatttgacctacaccgccttgtagtagaagagattttatttggactactatgatagccattaaaatcctaaagaagatttcatcatcaccactaatggcgattctcttggtagctgcatgctgcttacccgtacttgtcctggttgttcaaggattaatagaaaactgtcgatacagtcctccatcaacttgccttgttcaactgtttgtggactcatcttgtccctccttgctattgccttcaactgacgaactcccgtcacccggaactcgacgcaactttgctctaccgatgttggttctccttcaaagatgagcctgttgcgcaccatccattgcgttgtgctgcaaacgtagctaaaattctccaaagacgtttcaatgtgtcttcatgcttggccgtgcaagaccccgccgtgagggccactctcctcttcagtgagtccggaatcgggggagcttgccgtgatccacagtactctcggtacccgaggaggccactgtcggtcacgtcagcgccaccccagtgtctagctagccatttccagcatgccaccgcgcacggacattcccagaaaatgtgacctgggtttccttttcttgggtacacgcgcttgttttcctgcatgaattgctgtgttgtctcccttcaaagaacaggtttagctgtctgagggccattctgtactaggtagggagttagggaatgatcatggctccataactgcttgggtcgttgttgctgaagcccacgttgccactggtcttgtttcgcctgcgtctccagtctctctatgaccacgccaataccgcctcgcaattctatccgaaatcgttcgaaggcttgtcgtttgagcccctttgatacatgtttgttcttgattctctcctccacagtccaagggtactgatgaaggctcggatgtgcgtaaaatactacgccttcaacttgggcccacttctgtaaagtctgcgtagtttcttctgtgcaattctccacttctatctcccagttgataccgttgggtagttgcctgcaattgagttgccagctcgccgtgccttgtgaggttgctgcgcctgagagatgccccgttggccctagtcgccacgacacattgcgtagccattgcggcgggtgccttaatttgaatggtggatcgagccgaccttctagccaatctctcggagatagtaagataactataatcgcccacttgcacatggttctgtgacggtgccgacgcccttcatttgattcctgcgcgacgctaaacgaaaaacgcccctcagcttcttttcgaggttcaagttgatcgagagtaccatcccttatccgtgaaaatcttctcccgcttaacagaaatccagatggtgctgtcaaccatgggttatcactccaaccaaaggtcccccaaaatgttttaatgtgctccggccacgctagccgcgagggctctacctcataattcagctgaatcacgaacctgtcatcagcatcccaccaactagtgctcgcctctaggattgctgcgtaattggtctccactatttcttctcgttgcttacttcttcgtccgctggctggagccattcactgatgagctgcattcctggctctactctctgattttttgcatttgacgttcttggcgagaccgacttgtttggggccttgagtacccagaacttccaggcttgcaggtaaagatcgggtttttgagtcagccatagcaattcatgtttcgcttgctgtgttttcaccgctaacgggatagacaccaaaccgattcttcctgcctttcttggtagaaacactaacccagggttaatcttgtgttttcctccactcgtttccacgtgcgcttgccaaagaaaatttttctgaaggcactgaagttttttctccgcccactgtggtagttggaacgctgcagaagtgaaagtcacggctggaagcaccatcgcatttagtattgccactctgtcttctaccgaggtagctaccctgcacgcggtggccaaacgtctttgtattttgcgaattcgatctgcccaattcacatcgcgcatctccgcagtccctacttgataccccagataccgggtcgtctctccatgtctgagaactgggatacccaaaatcgtctttctgtactcgacggcggtgttcaaacttataaacacgcgtttcgccggctgcactcggagccccgaaaactcaccaaaccgtcggactaccatgagcacacgcggcagttgctttgccttttgcataaaaaccgtcgagtcgtcgacaaacgcagagaacaagtgctctcgccgctccttgtcacccggcactgctacacccgcaatttgcgattcttgtgccagcgctagcccaaggatctcagcagctaaaatgaaaagcaaaggtccagcgggcacccctgcctgataccagattctatcgggctctgatccgatagctctccattgaccataaatctagctgttgtcccagcgtgtaggttccgcatcacttccacaaattcactgcaaaagccgaacttgcttaatactgcaaacatgaattcacggtcgagcgtatcgtaggccttcttgaagtccagcagtaatatgccggcgctgtcttctaagtctgctaatgggtccgccaccgcacgttttaagtgagctaacatcatcattaccgtcttgttcatattcctcccatgtacaaagccttgttgcgagtctccaattaatcgccctagaaacatttgtagtcttgttgccaacaccttagccacaatcttgtagctggtttgcaatagagttatcggccggtaatccatagcgctcgtcgagtcaccctttttcctcaacggaattatcagacccctaaaaaaagtctgaggtgggcgcttgcctcgaaggatcgaatttcctactctcgtcaggatcggcgccattacgtcttccatatccttgtaaaagtcgttgttcagtccatctggtcctgccgctttttctctattcagcgctctgatagcctccacgactatgtgttcgtccatgttagtagtaagcgctgcgttgtccttgtcggtaactcgtctctcggatggtaccgtggcgaactcatctagtctgcgttttagatcatctaacgggaccgtacggtggctccgtccttggatgtcattccactcttgagcaaacttgtctgctatggtggacctgggtgcgaactcagtcccaggagatggtagtatgctgctaaccgtttggtcacgttcccacacagacacccggcgaaacctccttcgtacactggcatgcgaccgttgtagtgcgtgccctgtgttgagttccttgcttactttcgcctcctcaacgtttgctgcgatcagacctcgccgcgttgcaatgcctgctcgctctctacgtttcctggcctttgctctccagtatcgtcgctgtttcagtattttggataatcgttttatcgttttcacgcattgatgtacgacttcgtcccacttgatgctcctttcctggtcggcacccaaatcctcaaccatttccgctcgcaactcggttttcactcgttcctggttgcttcttcggatggggtattttacccagcgaggtgcggttttgttgaccttgttaacgacgtctccgcgcctcaaatgcatgattagtgtttgctgatcactactgaccggcggaagttggacttctaaccattgaaaccttggaactaactgcgctgaaatgtacattcggtcaattcgactcgctgccgtcgtagtccagtacgtgtagtggtgatgtggagccacctctgcatcttcctctgctccccctaccagcacacgtgcatcctgccacaacctctcgtcgagcaactgttccagctctctgctttcaggtttagtagcacctgtgtacccttttctatctagctgaggatccaatacacaattgaaatccccacccatgatcacaggtttgttttgcggccatggccactcccgtagatttttgaagaagcgctctcgctcttgatacttgtttggggcatagatattgactacgatacagccttgtacttctaatgccatcactcgctttgtccatttgtgtcgttgccatggctcagactgctttgctactgccggatccaacaagattccaacccctcctgtcttattcgcgtgttgactccagtaggacagcttatctgctggtcgtcgcagtccccacattcgattccaatgctgtcgctgctttttagcatcctcatccgacgcaacatgggtttcctgcagtaaccaaacactcggtcttgatctacttggagtctgtttccatgctgaataccactttttccttgttttgctggcgaaccctctcacattctgactcgcgtaccgtattccatcatacgctcttccctcctcggtctttttggacggatcatagaatgcgccatccaagatggctgctctcccatatacatcctctgctgctcctggccagcgctcctcagctggctcgacaggaaatactactttggatctaataggattgactgtcatcgccttcaatctgcgctacagcattcacgaaaaagtcgctcacttgagcccagttaacttcctggtgagaaccgctgagcgctgtatggtagtccgtatttttctgcaacacttttaggtgaagcctcaccttagctggtgtgctaacatcgtctgagacctctatgcctgtcaacgcacgttcttcttctgcatacatctccgcgcagagcagatgaattgctcccactgtgcggagactagggtcacacaagtgcaatagttcatctgctccgtacttcaaggaccgtagcttctcccagtcgtctttgctgttcaccactgcggccatgtcctcttcagtgtcagctgcattccatcgaccactccacttctcgagccaccttttcgttccttgcgttcgtgattttgccgctagtgacatcaggccgtccacaatgcattcacgtcgccccacgtggacagggtctctgcattcagcaattacagcacttcctctctaaagaggaaatggcgcaaagcttctaacaaggcctcgggggcttcagtggctgctttgaaccacacatcactcgagccgtccgctcgtggaaagctccccgccctggtaggccatgtctgctcaaatgcgttccactgatctacccatggaggccgattgtcagcctctatttctgctcgtgctgttgcaactcctgtttctggttttccacgcttatacggcaccgccgcgttgtgagttcttgtggattctgcagcggaatcccgtggtgtacgtacgctgaataatgctcttttgtatacttcaaaacgataggcatcggcatttcatcctctattgccttcttcttggcctcgacaagcagttggatgcacccccttatctccagtctgtattgcagacctttgacgaaggactctttggcttttgtcctggttccaaaggtgtacttcgtgcactgccatcctttctgccccattgcgtccttgcctaagacgaatatatctcgctgaagtaggttcgctgctaccatgagagtccccaatttttccgcggcaccatcgccagtgttgcttccacattcgaaggagtggatgcgtactcatctaggtactgcccgaacagcttgagtgagtttggccttgacatagtgggccatcctctgcccacttcggttagcgcctctcgccgtgcttggtgcgggaattgtttttccaggttcgttagagccattacgcgaattcctcttttcagcgtcgcaaccatttcttctagatgcgttggatacgcatgaagatcatcatccactagtgcttgcgctagagctgttgcctgacagtttccattcatcatggtcttcactagtcggatgcctgcacactgctctacctcctcccacgtgtctggttccgacgcctttggtgatggcttgtgaaagtccagacgagcactaggctccgttttcacctgcccccctaaggcctccaaagcatctcgttcgcgtttgagctctgccatcaaaattcctggagctgctattttttcttgtgattctacttcaccgttgttgtgatcacggctctgctgcttctcatccaggctacttttgctttctttcgtctccattggatcttcatcatccacgacaggctcccccccatcccttgaagctgatgtcattgttttgctggcatttcttgtctgaatcactacttttggtactctccttggcggaattctgatccttgctcctgccgattcacttacccggtacgttggtccttgtgagtctcgaaccccatttgccatggaagcctcactctccttcttttaatcacgtttcttctgctgctgtcgctgtagtcgtgcttcggcatcttggcggatgtcttccatgctcgagaacggcttagccagatcctcgagcccagtgagctccgcttctgttaccgttttggtgccttttgccatcttctcttcctcctgctcattgcagtgtaacattctatgaccttgtcctccgcagttaagacagagaagtcttagcggcgttctcggatgttgcacaatgagattgtgtccgaaccagtggatgcgcactattccttccaggaatattgggcatcctgccaactgaaattgcagttgccatactgacgacagatgagctttcgggttgcactgatctagcggctccatcgagaaatccatcggaatgtgcttgcgtaaatacgcttttagtttcccaatctcgacaaacctcgtcacattgtgtaggcgaatttcgtacacgtttggacgcactccggcgattccgttcgagctgcgctgattctcccatgcgtttctcgaagccttggcatgcacatttcgcaagccgtacacttttccgcggaaaggaatgggcacactagtcattgacgctgctgtcgccctcgtgaagaaataaaagtgaatttccttcttcactctgttgtagctcacggttttcagggcgtttacgaagttgtacagactttgagttgcccctggttccgctgctcttaaaattgcttccacgatggccttcgtgctctgctgtgacgcatggagtttatcacgccctcccaaccgcagcgggagttctccttccacttgagcctgaactgttccatactgtcgaagacgcgtgtcttcatctagcacatgcttcacgaatggtggtaactctcggcatgcaatatgcccttcaagcatacctttaatgatcgtccattcatcctcaactgaccctgacttccttgctcactccgtcgcaggcacagcgactcgagtcttttgatgtcgtcttgggcggattgaacatgaagggtttgaattccactcgatgctgcccctgcggtgtgttctcgtgcactctaaaacccttgactacttgagaccacttgtctagtactggtgctggggtccatctgaactgactcgtggtttggacgagtatgtccgacagcattctgggttccgcatacaatttcttgcagatgatagctactctacgttgccaatctgcatactgcatcggctccttctcctgcgcgacagctatgaactccagcaaatctgtgacctctgcgtcggttaggttggggtatcgttgtttctgctgcggcacaaggtgcgatcgaattggcagtctgtcgtgctcaattttgaacagtgttttcaccgtgctcttccattccactaagtaggtccccttagggtgcgctttcagagctgaaactaaagctgtccaaatctcttccgtcggaatcccagtcttaccctcttctggcttgtcttcttcagcagatcccgcttggctggcctcctcacccgcttcaccatgcttgttctcctgcgtgtccctcctatcttgactctgctcgtcgtccccacttgcagaagcagcttcatcgtcactctcacttctatatcgtggctcttcatttttctcggcgttctcatactcaccttgttctgatgacgcacttgtttgctgttcccggccattgggctctccttctctggcgttttgaccgctttcttccgttatttcgcgttcgaggtgccgttcatggtcatcagctgtcgtcttctcttctcgctgcccacctcggtcgtccaccatcgatcttggacctccatcctcgccactccttccggggtccggatggagaggcggaggcattgctccttgcctcagttgacttggtttcagtatacttctccaaggtgaaacccctgcacttgtgtcactctcgatccctccagcctgtgctcagctattcggggcgtgcgctaaaatcgcaagtgcctacaccgccttggacaagacctacagtgcgtgcgtgcagctataataacatgtagcagcctcaaccgaacgaccgcttgcttcaccgatttctgagaaactcggaaaactcttaaaatcgcacgccgaaaatacttgcgcacgagtttggattccgggtttgcacttctctgtatcgctggggctgtacgtgctggattcaaaggcaatgcaagaggcctctcacctgtgaacgcagggagctcagtgtgcgaggaaaggctccatttgccccggaaagcctggcaagaatctcgttgaatccgcgcgaagccaatttcccagcccatgtggtggcaccgcgatcatgaggagttgctgagcccagcacagcgctgtcgcctgcatgtgtaggtatggcttcgttgttgccgcagtgacgtcagtcgaggaggtttggttttcgctgtgtcgcaaggcatacaaattcccatactagctaacggctgtttcggtttagcagacaccagtttcgagacgagcatgcaaccttcccttcctcggactctgagtccgacactcagcattccagcaccagtgtgcctgcctgcattccatcctctgcagtagccggcattgcccattcctcaaaatcactcggcatttcccttcagtcgccaaccatagctctccacaccttgtcgccatgcttcgcctcggacgatcagcagcctcggaagcctccaattgcagcggcatggtggtctccgccatccgcagcagcctgcagctgcagctagagcagcgcggcgttcgggcgctgcaatgcgcctaccagacgcagtcgcgttgcaatccggagccgggagcgaagcgcggtcggaatccgctcagcctggccgtcgtgggagccgcggcgctcagcgtcggcctggagctgcaaatggagggcgtcgcacacgcgcgcgccgccatcgagccggctgtgccccagccgagacacaagtggcagttgtttgaccagatcggcgccggcgccttcggcatcgtgcggctcggcatgcacgaggactctggcgaggtggccgccgtcaagatcgtgcccatggagaaccccgatgaccgacgctcgtacccgtcgctggagcgcgagatctcggccttgaagctcgtgaaggcgctcggaggccacaacagcatcatcgatctaagggacgtctacgtggaaggccgcaagctcttcctggtcacggagttggctcgcggaggcgagctcttcgagcagattgtggcttacggatcgttcccggaggccaaggcgcgcgatgtggcgcgtgagatggcgagcgctctctcgttcctgcaccgacatggactcgtgcacaaggacatcaagcctgagaacatcctcttgagtgcgcgcgttgtggagcacaacaccagcggcgtgtaccgcaagggcaaccgccacgagagcaccagtctggtcaagctcgcggactttggcagcgctgggcctgcaagcacggccaccaacctggaggacatcggcacgaccgcctacctgccgcccgagctgctgacgaccggagtctgcaccagcgcgtgcgatatgtgggccctgggctgcgtgctctacatcatgctgagcggctcgcatccgttcgacctggacggcatgtcacccgaccacgtggtggagcaccgcatcaaggccgagccgatcaccttcgccttcagcgcctgggacaacgtgtcgcccgacgccaaggacctcatctccaagctgctggccaaggacccggcactgcgtctcacggcggaccagatgctgcagcacccgtggatgatcgccagcgcggaagcctctgcggccgctggcagcctgcgcgcaccgtcaccgctgatggcgggccagccgatccccatgagcccggcctaaaggaaccctccctcaacgtgcgcccgtgtactatggaaaaactacaactacgtatttaaagcggggaacgcaatgaagttgttcgctgctgcgaggactgaacgccgcagcggcacagcttcgagttgtgtgtaaaagtactactgacgagtgaaagacgatagaaaaccaagttgatagacgagaggaaaaggagatgcacgtgtgaattctcaattaaaacacgctttttgacactatcgtctagacgaagcttcctacaattgctacacgggtgtagaagaatgcatgtatttgattggaatgtatggagacaaaccagggcaagaagcagatggagacgcgctgcataaagcccaactataacgtctcactggagttctctatcgcattatttaaatgaccaccccgcacacaacgcatccaagacgcttcacgaggtggagataccaaatgctatcggcgtcaacacaaacactatccctactctcggcaaaacctgaaatgaagggctcctcagtgccgtcgtttccagacagctttggtacactgtaccatccaaacctccgccaatgaatcactggcttctcgtcttgacttggtgtttgtattttgtctccaatcctccccaaccgcatacccattctgccagggagatactttggttggccatgcgttcgtctggcggcttcctccgcccccatacataatcgccgagcattttgacatttcccggttgaaaaagaagagcaagtatgggtcgtgttatccgtggtcagcgtaagggtgctggctccatcttcaagtcgcacacgcacctccgtaagggcgccgccggcttccgcgccctcgacttcgtcgagcgcacgggctacatcaagggtgtcgtcaaggagatcgtgcacgactcgggccgtggcgccccgctcgccaaggtcacgttccgtgacccgtaccgcttccagctcaagcacgagctcatgatcgcggccgagggcatgtacacgggcatgttcgtgtaccagggccccaaggcctcgctcacggtcggcaacacgctgcccctgtcgagcctgcccgagggtaccatcgtgtgcaacgtcgaggccaaggtcggcgaccgcggttcgttcgcccgcgcttcgggtgactacgctgtcatcgtgacccacgacgaggacaagggcaagaccaagctgcgtctgccttcgggctccaagaagaccgtcccttcggcgtaagttgctgcttcatttctggatttttttccatcgacgcaatgattcggggactctgaggagggtccctggggcacggcggcgctcgtctctgttgctacccctagtgacagagtgagtgctcgcgccgcattgggagctttgtctccccttgcgtgtgtgtgtctttatcattcttcccgccttgtgcggtgagtaagtatctcttggatgatgacttgcgcggaagtgcgatgattggttttaggggtgctgctgatcattgatcgtcgatagtggaggggggattggtggtgacagggttactgacttgtgtgctcgcttatgggaattgatctacaggtgccgtgccatgattggtgtggtcgctggcggtggccgtaccgacaagcccatcctcaaggccggccgtgccttccacaagtaccgcgtcaagcgtaacgagtggcccaaggtgcgtggtgttgccatgaaccccgtggagcacccccacggtggtggtaaccaccagcacattggtcacccgtcgaccgtgcgtcgcgatgcccctgccggtaagaaggtcggtctcattgccgcccgccgcacgggccgtcttcgcggtatcaagaaggtggagaaggacaactaagttgtctagctctagcttaatccgcagcctctcggctgcacaacgggaatgccataatgaaatgcttttcaaccaaaacacctttgtcttcttctcatttcttgtatctacccatacatgagtctctcagcacgacgtcgttcctttgcctctcgtttctctcgttcacgtcgcaactcttgcagaatagcctctttcttgctggtctttcgcgagttcttcttctccttgtggtgtttgcggcgcttctttgagcgtttatccccttcatcttcgctgctgctgtgtccacgacggcctttgcgttcaggagacgtcgacgagcgattgtacctggccgaatacttcctgcggtcactaccagcaggtccttcttcatcaacaccgcgtcttcctctcttctcgtccgagcgtcgagaagtatcaaacagcggacgcccctccttcggccgcatgtgctgcaatggatcggcgccttccagctccctacaaccacagcaacaacagtcagctaacagctccatgcttttcttgtatcaatctgcactgcgcacctcttgcgcttgcgctcctgcctggcagtcggttcgttcttctccgcgtcttcagcctgagcataccacggcagcttgccatgtcggcccaaagtgtcgtccatcttctcctccctcttgcccccgctctttgctttagctgccagcgcctcctccgccttgaagaagttgatatgctgctcttctgctcgaccgccgcccgttgagacgagcttctccgcgcgtcgctcctgctccagccgccgctccttcgcgtcccgatcccgctgctgttcctcgtgctcgcgctcgtcgcgcagcacgtgctcgatgttgtcgcggcgccacacatgccacttcttgtgcggcaggatgcgcagcccgccgccccccatgctgcctcttcgactgattggttggctttgttggggaaaatgaatgtgtatctaatgaaggcgcttatggacgagaatttaccgaggacttcctcaaagcaagccgagtaagaactacggtatcgtagcccactgcaacgcaagggaggcctccatctcctcttccagccaaaagctcgtcattgacacgcatggtctccaggtgacttgaggtttgtatgggtaccaacttgaagctggtcacggtacactttcgccaatcatgaccccgaccagctcgctcatttcagattttgcgcccaagcccaaggactcgagccaagccaagcgatgcccaaggccaagcagctcgtcaaggacggccacagcgtggtggccgacatggtggagggcatggccctcgcgcacccgcacctggtgctggagcgcagcgagcgcgtgctgctgcaccgcgactacgcggccatccgcgagcgccaggtgacgctcatctcgggcggcggcagcggccacgagcccgcgcacgccggctacatcggcgagggcatgctcacgggtgtggtctgcggcggcgtgttcgcctcgccgtccacgcagcaggtgctgacggccatccgcctggccgcggggccgctcggctgcctcgtggtggtcaagaactacacgggcgaccgcatcaacttcggcctggccgtggagcaggccaaggccgagggcctcaagtgcgacatggtggtggtgggcgaggacgtggccgtggtgaacgccaacgccgggcggcgcggcctcagcggcacggtcttcgtgcacaagctggcgggcgcagcggccaaagccggcaaggatctcgcagctctggtcaagatggtgaacggcctaacgggcgagagcaagctcggcactatgggcgtggccatcaagccctgcacgctgccgggccaggaggacagttccagggagtggggggacaacgagatggaggtggggctgggcatccacggcgagcccggagtgagcaagtgcgagcagcaggacgtgcccgcgctgtgcaacatgctggtggagaagatcacgacggactcgacgagtgtggggctggcgctgaaggagagaagcaggtgcgtgctcatggtcaacaacttgggggccacaacgggcatggagctctacgtggtggccaagcacgcggtgcaggctctccgcgccaagggcgttgagcccgagcgcgtgctggtgggctcgttcatgacggcgctggacatggcgggcttctcgctgtcgctgtggaactcgaacggcgacgcggacatgctggcgctcttcgacgcccccacttcggctcctgcgtggacgtactcgcccttcgacctcgcgcagtcgtcgatttctggaccgttcatcaaggctgaagcccccgtccagaccacgaagactttcgagcgcccggccgagctctccaacagcggacgtctgcttgagaagtgcattctggccgtgtgtgatactctgatcaagaacgagccccaactgaccaactgggacaccaaggtgggcgacggcgactgcggcaccacgttcaagaacgcagcggaggcgatccttgccgacctgaaggctcactacccgctgaacgatgctacgcagacactgcgtgcacttgctgactctgtcggtcgcagcgcgggtggtacctctggagtgctctacgtcatcttcttgacggctggctcgctccacctagagagctgcaaggaagtcgacactgccgcatgggttggagctttccaagcgggtatcgcagcggttcagaagtacggaggagctaaggagggctcgcgcaccatggtggatgcacttgtgtcgtcgcttcgtgcgcttgacagcccgacctcgaagaatggcgctgaattggcctcggctgctgctaaggcggctcaggacggtgctgaggccacggctcaaatctccaccaagcaagcttttggccgtgccggatacgttggcgaggagttcggtgcgggcatccccgaccctggtgccaaggccgctgcattctggatccaggccgtcgcggacgcggtgaactcgagctgatgcgattcagccggagatatagtaggaaagcgtacgtggcgagactttcaaacttgtatgagatcgtgtcgtgagcaataatgaagctgtttggcatgttgaagttgtcaatgaccacaaagtatcttttgcgcctgatccctgacaggcgtcgactcggacaccaagatttcgacaacaaaagacaccaagcggactcaaagcaatgagaccacgctggcatcctccacagctcctgctgttcgttgtggtatctgctttgagcgctgcgcttgcggtgggcgaagcgtgttgtgctgaatgcctcgagcagaccgaccctctacacacagtcatcacgtacgacccgctcgtgtttgaccagtgcagtgcagccacaggcatttgctgttacggctgctccttcacacacggcactctggagtatcaagatggagtaaccttcgacagcaatgggtcggcccaggtctcggctggtcaggccttcagcttcggcattaacggtgtatctcgtgtcacctacgatttcatgaagaccaaccaggttcaaacgagtttcgtcacgaacacaagcaccgaggcgagctccagtgggaatgtgttcactgtttgcgttgatgaccctgggacggtcgtcttacgtggctggggcgcagattcgtgcactcaagtgacggaggagtacaagtttaccgtcgttgaaggcaacgacaccggaacgtgcgactccagggggtccatcatcttggtaggctccgcctcgtcagcacacaatgaaccggtggatgctaccggtcgagataccacgagctcgttgtactcggaccacaacgactttgcgaactgcaatcctacacgaggcacggtggtgacgcaggaggatggatccaaggtctgcaagtgtacgggtgactggcgcaacccaccaacttgtgacgagttctcgtacgtcaaagtgatcatcaccattcttggagcagtggcgacggtggtaagtacagcgtttggaactgaaatatcggagcgaattgctgagctttcttgtgtagatttcgatcttgatctccgtgcgggcgtacatcaagagccgcaagagcaagaaggcgaacaatgatacaaacaaagacgcccaggaggacagcaacgacgacgatggcgacgacatcctctcagtcgaagtgatccacattggtagcaagcccccacctggaacaccaggcaagccttctcttgccattcctggatctctcgctcgttcctctttcatcgctagtgagcaaccaccaactgcaacgaaggagacgacactttgaagtccacttggaagtagtagggataaatacaagttcctcttatacgacgtaaaatgtgaaatgaggacgaaaaatacagccatgaatacagactgtgactatctagttcaagctcgctaacagccttcgccgccagcaacattgagacacgaggtgcgctcgaaggacgacagagtcgtcgtgagcaacgcccagaaaaccatgaacgaggcgcacacggccgctgcaatggcaatgatcgagcctttcctgccagtaaagcgtgaaagctttaaaattcgagcagcctcggcttggtccgggagcaatgtcagcagtgcaaggtgcagcactcggataaccaccgcaaccaggaagcagtacatggcctgagcgcgagcgtgactcgaatccgactggtactccgagtcgtagacgtcgaaatgctccccaatggcttgcgatagcgaaatggagaacggaacggccagattccccatggttaccagcaaactgaacgacgtgcactcgagtcccggttcagcgactgccacagctgcgagcagcgccacgaaatacgccagcgcctcaaaagtgacagtaatctgctccaccagcagtgtgagagcagcaacacgaagcaagttgaacaccacaaagagagccacaacgagagtgagagcggccgaaaccaccactgagccagccactgtctgtcgccatccaagcttttgcaagatgtgcatcgtaggcccgtgaccgattgccagcgctgctcctgcgtacactgcagcgttcaaactggagaaaatgttggtcgtcaaagccccggctggagcccagtactcgtaaatcgccttggccgacgtggcataatatgtgaagcagagccttgaaaggaaaatgtagcacatcagctggagaattgctcgctgatggaacaacttgcgggcggtgattttccattcgcgcggcgtcagaatgtggacgttgtatccagcgggattctcgtcctccagtaaacagaaccacgtggctgccaatgtcccggccgacaccagcacagcgatcaccaccatcccattaatcgtagctccccacgcgaaacttcccccgtaccagtcactattgcacatgaacgccacgaagaacgtcacaatgaactgcgaaagatatcgtgccgcaaagagtgtcgtgacgacataagtcggtcctgaagctcgcggcattggcaacgggttggtatctccatccagctcgcactgttggtggtgaaaatgcatctgctgctgctcgctggcttgatgcagctgtgcaaactcaaccagcatgccatcgctcgcagtgtccgccaaaacatatccaaaggtggcaatcacgaacatcgccacgtatttgttcccagcctccgctgcactgctattcgtcacagctccgtccgtcaagtagggcgtctccacaggaagcacagctaatataaacgaaaagaagaagcatattccccacccgatcaacatgtacgctcgcctcctcgaccctttgatggggacaccgtccgacagcatcgccatgaagaccttgagcagccacggtagagcaagccaccgctccgccgagtacgccaggtagtcgtccatattcaggtacacgttcaagtacgggtacatgagggactggaagagcccgtgcactgcaccgaccgcgacgtagttgacgaatagtccgatgttttcccgtgcgaagagatccagagctgctgcagcccgccccgacgggagctgcttgcccacgaccatcaacgagtcggtgaagttgacagaagcagtgtcggactcggtgctggggcggtagggaagcactgcggcttcgtatttggcgccgtcgtcactgtgagacgccgaggccgtctccagcatggagaagttctggcgccggtcctgcggagagatgtcgtagctgttgagctcattctggagctgctgctcgggtgagatcacgtatccgacgtcgccttcggtcgtacccatggcctcgatcagaggagggaggccgagcgggtgtgacgatgactagctttggagatcagcaatgagttgtggtggtgccttttacgtctgactcgatttcggtgggtccgttgcatattttaatcaagagatacgagttcagcaggtgacttgaatagagggcggaaaaggcatggctcctgggctcttgggcgaacccaaaaagtcgcgagcttgggctcctgggctcttgagttcaataggttaagtgaaaggagccctccagaactgtgagccctcgttaagggctccccctcacctgtgttaaatatctcgctgatgattggccgtcagtgaagtatctccaggttctaacctgaaaaggcataggaaagagggcttctccttgaagggaaggaaggactatcggcgacgctgggatggcctcggagcggctgtacacatatgagcggcgcgagatcttctagtgtggcgatctttgagctcgatcttctagcgtggcgcatcgatcacgcgaagttactcgccttaagtctaggtaaaattggccaatcatatattactataagagcccgtcatagatttgaagctaaatttggggagccctggaggggagccaatggggagctccttgatctcgtacttaccatgagggagcccattttgtgcgacttttggcgctcgttttagggggagcccacttttgaagtagacgggctcgggctcgtagaaggtgtggtgtactctgtattgaccaccttcatcctcattgtggcggcggcacccaccctccgcacaccaagtgctgcttttcgtcgacagttggtgaaattgttgaccttatagcgcagctgatggatagagttccccccgagcacctcgagatatagtaacgctaccggtgcttgtatagagctctcacagattctacacaggtggcaaagcatggaggggaagctcgtttacggtgtttgtataccatctccaatggatttcgtctgtttggcggtagacgttggtccggacctacttcgtaatcgggatgccattccacaattggactgacagcccccaggtccgagtcttcgcaggagaatgatgcgtctaccgttcatcctgctaatgaccactgccgctgctttcatgactactgccgacgctataacatcgacgttgaaccaaggtgatagtgctgaaggtgttggcaggcgattcctgcggactttcaacgacgaagacgctgataccaagacagaagcaaggtcactcaagaaggaggcatctaaagatttcgggcctttcgtcgttagctcatggaacatcgacccgacacactaagttattgcttcacgacaacagtacaatacgcgaatacaacacgcttctaaccgattcgacgttggcattgagagataattacgtggttagccctgacacaaactctcgtttagtaaatggtcttgtcgtagctgcaggtcttgaggatgtcgctgccgatgtctgcgggcagctcgtagacgcactcggttgcgacggaggcagcgacgttgcagctgttgcccacgtacgagttggtcttcttggtgatgacattggaagttgacgaggactgggtgcgcatggtgatcttgtagttgccgtagctggccttccgagccatgcacgtgtacggggtgaagtcgttgacgttgtcggtgcttttgcccgcagctgcagcggcagcggtcagcggataccgaccaacggcgagcacgtaggtaccagagctcagtcgctggatcaggtacgagtcttcagccgtaacggagccgtctgtggttcctcggctgtagtacgcggcgttgtcgtcgccagcatcgtcgttactcgccacaagcgagagcgagccgtccgtgagcttcttgaacaggaagatgtgcgggtcgatgaaggccgagtcgcagtccgagttgacgtccgagaacgtcgcgttgtctgccgtctccatggacagcaagttgatctccacgatggctgtggacggcttgatagtcaacgtgtactggtccaccgtcacgtagctcgacttgcggaagatcgtgccgctcacaacctccgttacgaccggaagagcagcgtcaaccgagccgatacaccacgaggcagcttgcagcaacaacgccgcagcacccatcgaactgaaaacaccacgcatattgtctgttggtctggcactgagggaagaatcaaagtgagagcaaggagactacctttgcaccacacgcgacgatgcctccgacgaaacctggaagaacgttcatgcctacattaagccacttagtcccatcaaaacagccacaaagaatcgtattctccacagcatcgcagtcgtactcttcaaccacagaaaccaccaacacgggacatcacgaatctaaaaaacagtcaaaagcatgtgcattctcaagtaaaaaaaagtctataaacctgctcgctccaccttcccatccatccagccagccagagtgaggtcaactcctcttcctgttctgttgtgcggcctagttgcccagcaggtcgtagtcgtcgagcttgtcgttgtacttcatgatggtcctcttgatcttggagctgtcgacccacgtgacaaagtcctccatggggcgcgtgaccaggaaggccgggtccgacacgaccgtggggcccacgcgcacgtggccctgctccacgaacgtcgtggcctccttgatgctctcggccatcttgacgcgcaccatgacgacgggcaggcggcggcggcagaaggacgagacgttcacctcctcggccttgagcaggctcttcttggtctggatgagccccatgtggaagagcttgtccagcagcgccgtggtcgtcttgacgcggtacgggtcgttggccgggcgcttcttgagccgcgccacgagccgcgagatgtgccccaccaggcggttgtacttgtggtactgctcgcggtccgggatgcggtagcggcggatgaccttgatctcatgcaggttgttctccttcttccactcgagcaggtccaccttccgcagcagcttctgctcgtggaacttgagttggcggcccatggttactctgcccaacgatagtcgctatgtaatggagcttttcagtcaaaaatggtcttgggctgttacatacaaaaaccaagtgaaccgtcgcgttcccccaggttatgtttcgtctagttcgcgtggtccacatgacgctcccagagccaacggatccgtaacgcggacggagggcatccccatgtccggtcatttccaattggccgtacccctaccgtacctgtacgtcatgacggccgccgacgtggacaagaagagcaagaagaagaagctcaaggccgcgaacgccgagggcaaggacctcatcgcgcccgagtcgcacacgcccgcgctggacacgagcaagtggccgctgctgctcaagaactacaaccagctcaatgtgcgcacgggccactacacgcccatcgcctgcagctcgagcccgctcaagcgcaacctgaacgactacgtgcgctacggcgtcatcaacctggacaagccggccaacccgtcgtcgcacgaggtcgtggcctggatccgccgcatcctgcgcgtcgagaagacgggccactcgggcacgctcgaccccaaggtcacgggctgcctcatcgtgtgcgtggaccgcgccacgcgcctggtcaaggcccagcagggcgccggtaaggagtacgtggccgtcgtgcgcctccacagcgccatcgagggccaggccaagctggcccgcgccattgagacgcttaccggcgcgctgttccagcgcccgccgctcatctcggccgtcaagcgccagctgcgcatccgcacgatctacagctccaagctcatcgagtacgacgaggaccgccacctcggcatcttccacgtgagctgcgaggccggtacctacatccgtacgctgtgtgtgcacctgggcctcgtgctgggcgtgggcggccacatgcaggagctgcgccgcgtgcgctccggcgtgctgggcgagaacgactcgatggtcaccatgcacgacgtgctggacgcgcagttccagtacgacacgtacaaggacgagtcgtacctgcgccgcatcgtgcgcccgctcgaggtgctgctcaccacgtacaagcgcatcgtggtcaaggacagctcggtcaacgccatctgctacggcgccaagttcatgatccccggcctgctgcgcttcgccgacgacattgacattggcgaggaggtggtgctcatgaccaccaagggcgaggccattgccgtggccattgcccagatgaccaccgcggtcatggccacgtgcgaccacggcgtcgtggccaagatcaagcgcgtcatcatggagcgtgacacgtacccgcgtcgctggggcttgggccccatggcccagaaggtcaagggcctggtcaaggagggcaagatcggcaagtacggcaaggtgaacgagaacacgcccgccgacgtgtcggagctgtacggcaagaacgaggagaagaagccgctggttgaggaggtgaaggagaagatggagtcggcctcggaggaggaggaggcccccaagaagaaggccaagaaggagaagaaggaaaagaaggagaagaaggagaagaagaagaagcacaagcgtgacgccgacgaggccgaggtcgccgaggagggcgagtcccccgagaagaagaagtcgaagaagaagaagaaaaagtccaaggagacgagcgactcggaatagatggatggaagatctttttctcctcttcacttccactgctcggttgtgttcaccccatgactatcctccggacaaaaaggaggtagcctgcagcccagccagcagtctcacaagcagaatcgagtgcctcgaagctgcgtgtcgtgtgtatagtgcacgcagctccgcatacagtagtcgcttcaaagtaatatatatcctgtatgttttgtttatctctttgctactactttctccacctcgagaaaaacgacgactcccctcctttctttccaggcttcgtcttcttcttgtgcgcgttggcagcgctcacttggtccacaagtcgttcgcgttctcgctccttcgccctcaagaccagcatctgatggaaatgttcacgcgcacgcttgcagcgccacgcgcattgaatcttgacagcgcaggcgaccttcttggcctcgaattgacggtccttctcgtcctcgtactctttcttacgagtagcaatcacatgcgcacgaactccagggtcggagtgcgtgttcttggggtgtcctcgacgcattatgcggccagtgaccaagtcctcgaaaatataatcgggtgcgtcatcttcttctcctccatcttctcttctttcttgactctgttgtcgtcttcgaagtaaacgtcgttggcgccgccattccttctcaatgctctcctcaacttcttcttcatcgctttcaatgcgttcgtacgtcgtgtcaggcgtccccggctcgacaattggagaatcgttctcgttgtcgtcggaataaatactcggggctcccttggcgaagacaatcgcgcgcgtctttctcctctgcttgggctttacgcgcttgactcggattcgtttccagcggtccgtgagcttcgtgacgggaacgagctccgtgatggcgacgccgtcgagaacaacgcgaaccaacccgaaacgatcttccggcacctccacgataatggccgagttgacatgcttatcacctttcttagggaataccttcacatagagaccgtcctctgcagtcagcgattcttcttcttcttcttcatcgtccgattcactgtcgtgcttattctttggagggggtgccatgggcttgagctgagagagcattcgagggaggaatcgcttgaacgcaccgtccgtcgtgaaccccgcgcaaatttcatcctgtcgagcgatctccatgagctcagcgatgctcgttcctttcggttcacgacgatagttgccggcggggaagtctctcttcgggtagaactggaacgatatcgcgcacttctgggcgatactgggcgctacgatcacctcgcgacccggccgacaccaacgcggcagactgatggcgcgcgtgaagaggtagtggaagtagttgcgctgaatcaacgtagcggcgcgtcttcgtcgactcaataggtcctggaaggcgtgatacgctcgtcgacctcgccacatactcgcaatcaaagtggccgagtcgtattcgagctgagcgcgtagcaggaatttccatcgcatctcgtccttctccatgaggaagcactcggcacgtcgtaagccttgcagctcagcgaccgagagtgttcgagggtttaggaggaacccaggaaagacccagtgcttctgcgagttgagaaacacgggcgtgccatccatgatcgcctgcgtcctcgtagtcacgtgcgactcggagagcttgacgatgaagcggttgcgcgtggtcaactccagttcgaggtctgtgaacattcgctgcatggcttgaagtcgcgtgtgcatcttgctttgggcctctttgatctcgtccagcttgcgcgtcagctcgaagttggtcttgaagagcacgggtgatgctgcgagtaaggcaacggaagacttacgtctctcaacgggggatgactcgggcgattcagtctgtgtaggggttgagctgtcgacaggatgccgcagatacatgacgaaccacagcgcgggcttctcaggcgcagtcagcagcaaattcaccaacgcgcggacgacttcgtcgatcaccatgtcgaagtacgcgtccaggttgcgctgagcttgaaggccaagacgaagctgatctgacagccactccgactcggtctccactgtgattgatacagctggctctgtgggttctgccttcgattgttcgttgactttagggagcagaggcactttgctggtgttgatgctccagttggactgcagtgagggctcctcccaggccaagaacgcgtggtcgaccttcttgagtcggcgttctcgacccacgagctttagttcttgctcgagcgcgatgatcttgcggatcaagcgcttgctctccagttcgtcttgtttggtatcacgaagagcgctttgaatcactcgtctcttcctatgcatctcgagcatcaaggcctcggacacggtcggctggagaacataagccaatttgcactgcagtgagcacaaagcttaagcgttagactcgaaacaccatgaagaatggtacaaggaatgacgtttacggctcgacgcaggtagtcagctaaccacggtagcggcgataaaggtctcgccatcagcagttcattcacggcgtctgaaaggtgctgaagcagctccaacacctcgggattctccaagtacgaagagttggggcgtgtggctgcgtgcactcgaggtagaaacttctccagccattgctgtctgcgctgccggcagcgttcctgctcgtgtctgctcagacgcaccatcgcgactctctgagtgctatcctggataccaaccaattcgacaccttgccaagtaaaaccatccattgattcatttcacgactacgaatacagtccaagacaacatgagaagtcttacaccgtagtggggaactcgagctctcgcacaaagtccagcgacgcggcgttcctgttcgtggctgtttcttgcggcatcaagtcgtgctcctttagccattcttcattgtaaagtttgctgccatatcggactcctccgtccgccaggatggtcacaataatgtaacctggcccaagctccctcgccatcttcaccgcccccagcacgttcaacgcgctgcttgggccaacgaagatcccatcgttccgcagcaagaagtaggccatgtccacgatctcctggttggtgccggtgacgcctctgtcgatgatcgcttggcggaggttatgcgtgacgctcgtgagcgccgccactccttcggcgatagtcgagcctttgacagtcggcatcatctcgtagccgtcctccatcgtgccagtagatcggttgttgttaatgaacatggcgacgttcgcgacctctgcagggtcaatgagccacaccttcacactcttgttctgctccttgaagaacctcgacatacccgcaatagtccccgaagtgcccgcagatgtcacaaacccgtcgatctctcctccaacctgctgccagatctccggcgcagtgccttcatagtgtgcgcgcatgttggcgacattgttgaactggttggggcagtaggcgttgggcgtcgtctctgctagccgacgagctacgtggaagaagtggttctccttgtccgacatggacgttgtgggcaggatgtggacctcggcgcccatggtcttcatcatctggaccttctccttggccgtgatgtcgggcatcgtcagcagcgtcttgtagccgcgtgaagctcccaacagagcgagggagacacctgtgctgcctccagtcgcttcgatgatggttcctccaggcttgagcaggccgcgctcttccgcatccaggataagggacttggcgacgcggtccttgatgctgccgctggggttggcgtactcggcctaggcgaggagtttgcatcccgtgagcttggagagcgtcgtgagctctagcaacggcgtgttgccaacagatgagggcaagtcgtcagagccgatatgctcatagcgttgagaatgggacgggcgacgttgccaggcatgatgaacggtgcttggcttgtttcaacgtctggtaaattgcagaatgaagagaagcctatagatgagacttggtgtggttggttactcatcaagaggatgcgtcagtctgcagagattacttcaagcaacgtttagtcaggagaccgcgatgacttctccataattgactgaagactagcgagactgttgtgtcttcacctggggcaggagacccatttctattaatccttaccgagttgtgtggtctcgtacgccagcgctctgcaacagccagaagcttcctcgatctagttctcagctcctgctggtgcggttatgaagaaaacacactcaactttacaccgtgttggggaacgagagttcgcccacaaagtccagcgacgtcaagccttcccgcggcagcaggtcgttctccgccagccactcttcgttatacaacttgctgccgtagcgcacacctccgtccgccaggatcgtcacaatggtgtgtccaggacccagttccctcgccatcttgaccgctccaagcacattcagtgcactactaggacccacaaacacgccgtcgttcctcagcaggaagtaggccatttccacaatctcctggtttgtggcagtgacgccccggtccaccaccgactggcgcaggttctcagtcacgcgcgagagcgccgccactccttcggcaatggttgatccggtggccatgggcaccacctcaaagccgtcttcgatggtgctggtcgagcgctcgttgttgatgaagaccgacatagccgcagtctcctccgggtcaatgagccacaccttcacactcttgttctgctccttgaagaacctcgacatacccgcaatagtccccgaagtgcccgcagatgtcacaaacccgtcgatctctcctccaacctgctgccagatctccggcgcagtgccttcatagtgtgcgcgcatgttggcgacattgtcgaactggttggggcagtaggcgttgggcgtcgtctctgctagccgacgagctacgtggaagaagtggttctccttgtccgacatggacgttgtgggcaggatgtggacctcggcgcccatggtcttcatcatctggaccttctccttggccgtgatgtcgggcatcgtcagcagcgtcttgtagccgcgtgaagctcccaacagagcgagggagacacctgtgctgcctccagtcgcttcgatgatggttcctccaggcttgagcaggccgcgctcttccgcatccaggataagggacttggcgacgcggtccttgatgctgccgctggggttggcgtactcggccttggcgaggagtttgcatcccgtgagcttggagagcgtcgtgagctctagcaacggcgtgttgccaacagatgagagcaggtccacggagccgggagtggaataggacgcgtcctgcagctctgccgagctcgatgtcacgctgaacgaagtcgcgaggagcttgggagagggcgagcaacggcgaagcacggagagcatggtggactggtgcttgggtggcaaatggctcaatggagcggtctcgagatgggatgccgcagatgcttacgatgtctacaaaaaaggcaacattcgccaatgacctgggtggagcaccggacgtcacgcccataggctgcccaaaatctcggcagatgtgcaggaccagtcctgtgccagatgtgcactacttgtcgctatctctaggatttagtaggactatcggtcgctaggcgtcttcgcggaagagctcgatgaactcttccaggtcgagggacgcgttggcgttaacgtcgaaggccgagatgatgcggatcacatcgtccttggtaagttgactcgaccctcggctgtcgctgtcgtagaaccgctcgttgtaccgcagcgcctcgagtagttctccagcgtcgatgtctccgttatcatccgcatcatagagctagaggaaggcacaagtgggcagagaattaggaccacacaaaatctgtgacgtgtgaaaaaggcaacttcaacttgacgtaccctgaagagttcccgcagctcctggatctgctgcgccgtcagcgtcttcttctgtacgcgtcgagtcttctccacagtctccagtagtctacacaagcgtagaatatcctccagcacctcgggaggggcctctccgaacacgacgccacagagctctgccaaatcgatgaggccgctctggtccttgtcgatgctgctgaagatactgccaatattgtcctgcatgtgcgtccccgagaagagcccactaccgtccaacagctcgcgtagagtaatagacccgctctggtcctgatccaacttgcggaaagtccggtacacgttgatgacgtcgtctcgagcgtacggaccgaagcgctcctgccgcatgagcgccgcgtccgagcggatacggaccttctttgctgacttgagctccttcttgggtatactggctctaggaacggcacggacagcgcccgccgagctggaggacggagtgccttggcggagtttcggcccgcgttctttcgccgtgatggccgaccgaggatgccggcgtcgcgctggctttggactttcttgcttgctgtctgaattgttgctgctctttgtggacgctgggctcattgagagtggatcgctggagctagagctaacggcgtcgactggtgttaagctgtcaccgtcgagaatgctcggtgaatcagcggctgagcttggcgatgcggacaggtacgtgttgctaggcagctcggagcttgggctgttgttatcatcgtgatcttcacctaggagctcgtcgtactgctgacacagtgtggacaggagacttcgtctgggtagagcactcgtgctgacgctggatgctaatgctggctcggacgggttaaggtgggcggttggtggggacggcaacgcagtcaaggaaagagctcttgtaagcgcagcgactcgcttcggacgtggtggtttcttggttagcttccgccgtcctggtagatccttgagctcgaaattctcacggataatacagctcactccaagcttctcgaaaagaaatgctgacggcgtcaagtccatggacgccagtgagttctccagtcgccgctgtctcagcagcccgctgctccctgcgatctgcttgttactacgccgaacgttctctcgatgaaagtgctcgtacatttgcttctcgcggttcaaactccccaccgcccagttgtctttgtctgcgaatggtagctcctgcactgggttctgaaggataggcagcagcattccagggtcatcagcgtctccagctccgccgagcacctcaagtctccccagcgagtcattcacgtcaccattaggatgatgttttgcagtatcctcttcgtgctggttgccctccgctcctgactcgtcctgctttttcttcttcgccttctgcctcatgaccttcttcatgcgttgttggaacttcacgcgctctttctcccatgccgcctgcctcgccagctgaagatcgctcttcttccacgtcgttttcccctgtagctggtcgaatagacgcttggtatggtccgcagctgcatcattctcctcaggctgctcttcacctggtgcaacctcatcgccgttattctcaacaagctgcttcagctcgatcacagtcgtcgaagcgcaggctgtcatttcttggacactcatgcgttgagcctccttctccttgtcttgaccgagagcgggggcgctagcactggcgataatcgtgcttcgcttttgagcgcgcatagccatcgctatggattgctgcctcaacgcagcagacttgagcttagttcccttcaactcgtcccagagttgctccgcctgcttcctcttgaaggctgcagcaccagcgacatcgacctcccaacgccattccactccacttgtcactgttgccacggaagaattctgcccagcaattggcgctggggtgggcgtcatacccgtggctagactccccattcttcgtccttggaagtcccaaacgtacacgcctttgtcgctcccgcacgtcaacactcctcgaggctcggcgacaatctgcagacagcgcacattaccacgatgagccgtccaccggtgcgtacacatgacgtccgactcgttcacatggagctgtttcgcttcagggtgactcccgttgtccgcgtgcttgttacgaaggcgcttagcgttcttcccttgcctcaagaacctcctgcgtgggttgtacgatctgtcctgacgcgacggcaggttctcctcacggaaggctcgaacgtgcgctgcacttatgaccttggagatatcgcagaccatcaactcgccatagaaactcgcgacaaagagcaggaagcgaccccgatcaataccctcagctaacaattcaccgccagtctcatcgtaaaacgtgcgacaacaggtgacagcgctgttgagcttggcaagcgtcaaaggtgaagacggaggaggcggaggttcatcaggagaccccatagctgcgtctacagcagaagactcggagtcgctcggttgagcgtccgggtcaaatgacacgaagttaaacccttcgacaccagcttctggtgcttcatcggacgagggcactgctggtatctcaactggagttacgggccgaactggagtcatgtggaacgggtagaagcacaggagaagcgtcgtgggctttgaaggcgtgaggctccacagacacacttggccgctttcgtgtcccgatagaagcagcggatacggctcaataaactcgaggacgtttacttcactggtagcatgagagttcgtcgctgtatgtgactgtgacgacgcgttgaaggacactccagtagctggaggcggtgccgctagcgtgtcctcaagcaggaagtaaatgtagtcccagattttgatagacccatcgatgcctccgcttgcaacgaggctgagcgcgtgacagtacgcgagacacttgatatcgctgtcgtgagcgtctgtgatgcagcgtagcagcacgtttcgagctgcgattcctcctccgcgcggcgcgtcatcgtcataaagtcgcagtgagcggtcccacgaggcagtgagaaccgtgtggtcttccttgcagtacaacaacgccgatacttgctgcgcgtgaggcgtccatcgtgcgagtacagctccattcaaataattcaccaccgccagctccccattctgcgctcccacgatcaacttccgctggcgcgagtcgagatctacctgcgtaatgtccgccccgaccaagtctcggtacgtgcgaagcatggcaccggacgcagcgtcccaaactcgaacttctctgtctgtagcagtcgcgattgtatgcgaagcctcgttgtacagaactgcgctggctgcgagcacgcgcggcttcacgcgcactcgtcgaagcagcttaaccttgtgaactccagccaccagcaggctctgaccattgtttagcaccgctagggagtgcgctcgccacggataccgactcaagtcactgcccaggcgaaagacctgcaagcagcgtcgactgctgttcaactcagcgtccgtactctcgacagataacacgttagccagtgtccaccatcggaaccagccttcgtcgtccaccgtgatgcattgatccgccaacatcctagtccccgatgctaccgctttagaattcttcataagggctgaagctgcagcgtaagttgcggatggaatgagctggatgcaacatacaggagaaccgtgacccgaaagacgaaacactggcgtcgtggctagcgcggagatctcccacccgaagacttcgcactcgaagccagcactgatgaatacttgggaggataactttaccagtaagcggactcctcgacgatgtccctggcgagacgcgcgcgtctgcagtgtgtgtgtgtcccagaggtagatcatgttatccatcccacaggacaacactgtgtcgtcgttcaggatcagcaagtcctgcaacaggtccgagtgtttcttcaacgtcgtcacaagccgcacttcgcacgtgccgacgctcgattctcctcgagacttggcgttccccgccttcacgctgatagtttgagagcgcgtgacctgccacacggagatcatcaagtccgctgagatggagaagagctgctgcgtcttggggctccactccagtacgcgttgaggacgcggcgtgtgaacaatcgctagtggtcgtggcgtctccatcgcgctcgtactgcacgcagtcaacagcgttgaagaccagaacgtgagctttaaatccccagccgagactgcgagtagatctaacccagccaggtactttatcgcttgaacaggtgagcgttccgagcttacttcgtcctggtctcgacggtatcccgagatgtagcacagcgggtggaacttgttcactacgggcagagttggcgtgaacgagaaggtcgaaccgatggcttcttcagtagtattcgactccgcgtttgtatctttctctccagaagctgctccactcccgtccttgacgttctcatcgctctcaggagggaataaacccgcagggtctagcaattccaccaccggacgagagctttcaagcagcaaaaccctccgaaactcgggcagatattcaatccgctttggaggacgattcactgcggtatccacgaagcgcgggtgctcttcgtactgcagatctcgtagctgtgccacagtccccgccacgtcgtcgttgcctccgcccgaagagcccatgccgccctcgatgatggcgctcgtgaactcctcccactccatcgttccgtctccgttgacatccacctgcgcgaacagctcgaccaggtcttcgatgaagttgacgacgctctcgggctcccagctcacgcggtccagcatgacgttgacgaactcacgcagcgagagtccgcgtcctgcgcggtcgaagtcttccttgagtaaggtcaggtcctccacctggaggcggaccatgatgcccagacatgcttggtactgcagcaacgccgctgccatcgtgcaataatgtgccctggtgttttgcactcgagcaagtgagggagcggactcgcaccgtttcacttcattcgtcaacgcgaaggcgtcgatgctggacgaggtcccgtaaatttagcggagaccatcgcactaattgtttgtcgtgaaaggatggaggccacgacgaacgcggctgggcgtcctccacgcccgcgcgcccacaaaccaagctctcatggagcttggtccagtacctactcgccgtacgcgggtcccgtgcgcgcgagtccgcgcactgccaaactcgcccatcaagaccaacaagaccacgtccaaccacctcctgctacgagtcgaccgaaacgacccctttcggcgtcgcaagtggcctccacccgggtcgctatgacgtccccgcgaccgaactcagcacgaccggctcgaccgaatagcgctacgaagacgcggtacatgcagctcgagacgatcgcgttcccgatgcaaagtccaacggctgaagagttttcggaaacgtgtgaagcttgcttatcgccgtctccttctagtccagaggccggagtattgcaggaaaccgactcggccgcgctgcatatgaagcttcaggcgcttctggagatgtggggcgaggaacaactcggattccgatcatgtgtattgttttgtgagaccacatttcgacaagccaaaggtgtgtaagtttttagatttttttgcggcggtgtttgattattgtttaatctcttgtcgattttttgttttagctttggcgagcaggatgtctcgccccaacgcgttcatgtcagcggtggcatactcctgcctttgtcaaatggggtccgttcttgacgagaagtacccatttctcaacaatattatcgacgagctcggtgctgcgttgtattccaacttcacggacctaaaacgtcatatcggacaagaggatcaaacgcaacaccagtccgctatcttcttcgagcacggcaagccttggttccaggcttttctaatgcagaagatgcggtgcaggagcattcagagctcagcggatgcgtccaagaatgaggttcagctgcttacagaaatgctgcaagaggctcgagctgccaattcgagcgctgtggtgactgccgcggcagcgtttcaagtgcctcagcgacgcggtaaactggaggaatattacaccccgccagctctggagctgggcgatttgggcctggaatcgctgagtagcaaagtgctgaaagcttttaccgctttgtcggacgccgatgctcgacatttgctggcgctgttactggagaatgcagtggaacgggacatgcccaagctgccgaacatgatggcgaccactgtcggacacatgaagggacaggatcgacgcgagtttctgcgagaatgttttgactacgtgacgccaagtgaactccaggacgcactacacgaaagggatgaaatcaacgacgataaacgatatcaagcgttagtgggggatctacacgagttactgcagctacagccacatgaagatggctcggagatgaagaatagcccgtctaatagcgtggcattattccactcggaggaagctcggatcggcaaaagagtccacgaattggttgaactggtggaggacgtcgctacggaggtcgcgttctttgagccgaagcaccaagcgctgttccctcattcaattctacagagactgcgtatgtacgagtgccccatgaagcgcttgaagaaagagcatgagcttatgcagcggcagccgcgacaaactgaagacgaggagaagccccagtgcgagtgcgtctgcggacgacatcggctcatagacagcgatggagaagatgcgaaagaggaggaggttatccccgcacaatcagaagagaaggagccacaggaagaggaggacgcgaagaaacaaaagtcgcgtcgtaagtccacactgaagcggccgctgtctgcgccttcaggccgtcggaagaacgcgatcagcttcaacacgcgctacggatctccacgcaagtccagcgcatccatccacgtcttcccactagcagaagtgtgccacctcttgtcttccatcctgcaccttcagttctcgcgagaggcagccgaagctccctcgaatgctgggagcggagctgtctcgactctcactttcgacgatcactgggcatttctgcggtacgattcagcctcgcggaccttcaagactctcgcgaaggactacttgatacgcaagtacggcatcaaatccatcgccgtcatgcacacgctgcagctcgagcggtcgctgttgcactatactgccaaggacaaccacgtgcgctgcgagctcttcagctggttcttcggtgccgacaaaacccgccatcaatccaaagaccacgcgttcgccttcttccagagactggttaagagcatccttaacctgtacgcgatcaagaagacggtgcgatccaactcgatcacaataacggcctcaactcaacagcttcagcctctcgcgtactccgcgttgatcaccatgtggaccgagtgcattggcgacggcgagccgacgaaccctcggacgataccggcgagtctcgctctggagacctgtaagcagactttcccgcccgcaatgcagcggaatagccacttcaccttgttcagggagaagctgcatcggcgaagtgtagagcagaagacgatggacctcgaggaattcttccagggagcgatgacggcgtggcagttggtgttcgatgcgcagacggaggaggccacgaagacgcttgaaggagcagggacgctggatctggagggctttgcaaagtgtcttatcacgaacggcctggagttcacgacaggcgagaggtacgagctgttcgacctgctgacccaggacggcgacgagagcgtcatctcgagcaagaaaatggtgcagttcctcatggaagccaagtatctgcggccggcagcgcagccgtcgacactcacgctacttgcaggctaagaaacacggatcgtatcatttgtgctacaaagctacccgctcaagcacttcccgccgtacgccggcggtccgcactatctcgtgcgtccgattcatcgccaagaaccgcagacgacttgcaagtgtcggtgggatcgaggacatgccaaaaccatttttccaggcacctttagacatgacattttcagaagattgctacctgtagtaccgaataaccttagttatgggatacaacttgttaagggatacaggccaatttggccaatcaaaaggcacaaaaggcatcgtctttttataacatttcccggtgttacagggcacgtgttgctgctccagactggggaacatgtgacgaggctgaagctccagaactcctccagactgagctccagactctccagaactgagctccaagacttgtccagactagtacagcaggttaaggggtgaggagttagctagggtatacactccggttagtattgctgggagagaagacgacgagctggcttgaaaaccatgctgggagatggctgggagtcagctcgacaaaacacgagcccacaggctccacacagcgttgtacttgtcgcgctcggcccggattatgctgcgatacatcccccatgcatcaagagaactcggcgcggataagtagatgaaccacgacctgcagacgcgtgcaacaacaacgtagacaagcaagatgtattcgtacttcgtacgagcattatgaacctacggaatgcttggtcatctgctagtcagagacactacaagttcctctcgtggcgttggccaccaatgctgtcggcaacgtgctgaaaaacctccagcgacctttggtgccggtcgattgtccttgtcactctcagctttactctccacaccagcgtgcgtttaggggcagttcaccttcgagtcgtgtagttcgtccgcgatggcgttctccttttcgtcttaattgccaccattcctccgcctcatcgtccgagccaaacaaagcgtccgagcgaacgaagtcggggccgttctccgtgagctgggcaatcttatcctttgtgtgacaagcacctaaagccttcgccaccatgctcgtatttgggccgggtcgtagctatactctccagccgtctggcacaagacacaaacgtttagccagaacttcctccatctcccaaatcggcaaagcgaccacaccggcgtaccttgacagcctcttccggaggccacgtcgcgatcacactccgacgcagttcgatgcccagccgcccacaacaagtcgcgggcggtagagctggagcgttctccgctgctatcgcaaactttctccggagcgacacattcaatcctcgccgacgcggcccgttgatgcatcccggtctcctgcaacccgccccatttgctccgctgcgcttcctgcgctccttgcgctccccgcactccgtttcgaaactattcttatcgactagccattgccagcagtatacgctatacgctggtcggatgcaatacggcatttagggctagctagatgaaggtctacagatcgaaaccaggtgtttctagtctggagcagcaacaactctcgtatgaatcaatttgcaaacttccgcagcttcgcaggtcataactaaggttattcggtacaatcatatccggatactcaccatctcggacttggtctctccaaaacgtggtatgaagctcagcaccgttggaggccatgactataatcatggaaacctacatgatcggaaaacatgatttgtccaggattggtaagaaacatttcttaccgagtgagggagaaacagtgcgaccaatttagcacttgcgacgctcgcggaggaggcgaatgcgatgtattctcgttctgaggaggcggcgtttccaaatcgaaggtttcccgtgaagatgccgagcaacgcacgcggaagcggccaaggcagtgaggcctactgcgaaggccaaggtgaagcgaaacaggatactggacggcgagagcaacgacgctcataccgcggtccggggctctgcatgacgccaacttcagacgcgaccaagagcacgctcgacgacggcgaagggtgtgaggacaagagagagcacgacaaagagcaagctgcgatcaagggaaactctgtgggcagtgatggcgatgatgagtacgatgctgcgggggctactggggtcctgcaagtggggtgtacgtctagccgcgatggtgatggccacgaagaacacggcggggacgacagtgcggcaatctctgaaagcgtggagcctcctttgctctggcacacagactgggctgcatggaagatctatttgtctgagtactgcgagcgcaccaagcaagtgttgcccgtgaaagagaccctgtctcgtgcagagcgtatcaagcgcttaaagtgtactaagaaaggaaaagaagtctctatgaaagaaaacgatgactccctgttgctccccgaggcgtttgacccgtatcagcggacttatatttgcacccacggttggaaaaagaggaagtcacgcagtgaagttagtcgtccaaagcagcatatacggttgacggattgcccgtttagattcgtggtacagtggaatttgtcaaggggcgagttgcaagtaaagcttggatgctttaaccacaatcacccggtatcagctgctgcctacgcgacgtatccgacttctcgtggagttgacaatccacttgtagaagcacgtgtggaaggtatgttggccgtaggtgcaaaacgcgctcgaatctacgactatcttctggaacatgatcagaatgtcatccaagttgatgtggataacatggtgcgtgagcataaatcgtcggtgtcacgtgttgacgataacgaagctaccgcgagagaagtcgcgactttcgcagcagctgatccagagaacgttgcatctattgcagatactgatgcaggtgaaacgggtgtcatatcgctggcgagtgcacacatgcgccgtgtatatggccgatttagcgaagtgctgctagttgattgcagccacaaaacgaatcggtacgtggatttgtctctctactgagactatgtaacaatgatttataacgagccttacctgtcattgacgtcttagctacaactaccagctccttactttcatggccatgaacgagttcggcgaaggcgctgtggtgcagcagtcgctgcttgaggcgaatggagattggcacatggagaaagctatcgcccactttaagagagcccatccgacacggattaatttggtgcgcattatagttgtcgacaaagatctgaacgaaattcgtgtccttgaagctcacttcccagaggcccgcatcttgatctgtcacttccatgttatcaagtatctgaaggaaatgcgatcgaaatctgattttgggaagatttctgctgacgacgcgagccaagtcgacgcagcaatccacaaaatggtgtatgctgcttcggaagaagactacaaggctacgcacaaaacactgaagggcttgtgtgaaagaatcggtctgacggggtttttcgagtacttcgagaaaaattgggattcatgccaagatcgttgggtgatgtatcgacgcgcagatctgccacactttaacaaccataccaataatcgccttgaaagcttttatggaaagttcaaggatggagtagacagctccctgagtatgtctatgtgcgtgaaagctttggtcgcgtatgaccgtcgaatgcagaacgaatatcggtatcggctatctcgaattggccagttcgtgaacagcaactatgacgaagagatgtccaatgtgcttcgctttactacccactatgtagccaagcagattgaacagcagtacgctcgtgcattggacaatgtttcaaattacacgtttcgtaaagatcacggcgacccgagtctagttgtcgtgtacggcacctcttctgagtttaggcttagaacggacgagtggagatgtgattgtgggttctcgttatcaatgcgccttccgtgtcgccacactattgcgtatcgcaagagcgaaaatttagctggcccgctaattccctggagccgtatcgacaagaggtacgatcagactgacatcacgataatagtatatcctaaaaactcatcagccaattgcacttgcaggtggatgaactcagaccggaagctggagaaggtcagacagttctcatatgagaagttcaaagatgccaactcgggtcgccgcgagcaaagagtgaagacgcacgcggagcgctacagagaggctgtgagggccacacatctgatcgcaactgagatggcagatattgatgatgaaagcgagtttgaggagatgctgcagttcgtgctaaaccaatggcgcaacgtacgccagcgtaaaatcgccggttttgagcaattgtgcgttgatgcggtttccagtcatcacgttcaccaccaccaaaacgcaatagatgaggatgcggaagccaaacgcgaattcgaaattagttcaagcgaagaatccgatcagtgtctagaagtggagaataggtcatcgagttgtgatgtgactggatttagctctgtgcacgtacgacttaatcccaaggccaggaaggtaggggcgccacgaaaactaaaatccacaacggctgctggagcgaaacgtgatcgaaaatggttcgaagccgctgaagcggggcgtaagtgtgcaggagaagttacattagtggggttgctgtctgcgctggatcgtgagcgcccaactcttgtagaaactcagcggcgtctgtccggaatcattgtcaagtacagcgaggcgggtaccaagaaaccgaaattcaaacgcatgaaaaatcccgtactcatcatggacgcgttctacattctcccctcaatgctggtagaatcctgtttaaaggtgctccccctctctaacactaaagacaccgccatagccgtggacgttagcttggaaactgacaccaaacctcgtagcaaggaaaacggagacggctttattgatacggttcagatcaaagacgtcgggaatttttcacgcatgcagatcgagacgttcaagaaagttcaagatctgaaggaatcggtgcaactcggagtggacatgcacaagtggctcatcggaaagggactgctctcattgcctgctaaatatcacgccttggcgaacaaagttgcagctgacgtgttatctgcgtacccgcgcaagcaaatcgacggccttcccaatcttcctgactttgaatacgctatgctttacagagcgacaccacccatgtggcttagtgatgaatcaatcgcggcgttatgccatcgactacaggatgactttcctacttgcagatttgctggatttcagtcagctattccaagcaaaactcgcacgagacgcagtgacgcggacctcatcgatgtttcgatccacgagcgtgttctacagcaagtcaatgcatttggggtagacgtcgtgctgctgccgttgaattttccgaaggcacactggtgctgtgtgattatcaaggtgacggagaagtgtatactttactacgacccgctgaaccaagtttctttcatgaatacagcgaaagctgttgccacgcagctgaaaattcgaggcctgcaagattacactgtcctcgctcagtgtaggccaatccaatttgacacgtttagctgtggtgtatacgtctgctggatgtttatccaccaggtcgtcggtgggagacaactggacatgagcaacacctctctgacaagacgccgattcgagttgttctactatttgctatccggtcaacttctacctctgcaggatttaatgataccggatcgcatggaacacgacgacaccgaggaaaagctacccccaccgtccgaacatgcctacatcgatgacgaggaacttcagccgtcagagctcgcgcaaaagttagtgccatgaccacgtgccctagaggtttctcaaagcttagcactatcgccacaattaatacatgtcagctttgcttcagcttccttagagctctgctcattgagacgtaacgattgggatgacggcagtcactctattttccaagtatcaaaccagtatttgcccatgatttctcttgcagtgattctgcaaagaaaggagaaccacacgaagggtatcttccgcgtcctcaacgtatcttctctaatcttcctcagatggtactcactttagttaggaatcgctcgtccaggattaatcctgtacatcgtcatggacgtgtccattactataatcctggcctccaacacctgcctttgaagcttcatgagtgtttaccaacatgtacagttacacaagacgagagataatataataggagttccaaacgcgcattagtttgctgcctagatgaactaccgactttgtgcagtgttactatgttctttgtagtaagaaattgatcactcaattgaccaacaaggatgccttgctgcgtccctgtcttgttcccccgatgggaaagatcagaatagggggggtcgaaactggcaaaaacagtgcttacagttttggagttgctctgtttactttttgggaaatttcctgctcatttccgaggtaagccacctccggaggcggcttatttatgaaatgagctgcttatttcgaagttcaagttcgacgttgcgaaagtgctcggctcggtgaaacatagctcttgcccgcgacgccatagccgcaggcggccgtggccatgaacatacaaggactgtccgtacagatgaccacggaaaaatacgccagcactgaccactatcctccatagtaaacaggtagctaccaaaaaaatacaccagttgagctgattagtcaaaagtgaggtattaatcctagagaaaggtcaataatgtagaaaaagacgacaaggaagttacggtcgtgacaaagaaaaggtggagtgtattgttgtggctacaagaattccagagcttcaaagtgcttttcaaaactctcaactacaatgtcctcatcaaggctgttccaggctatgatagtgcgctcgataatatcaaggcgtttttcttttgccgttttggggtttttgcggtaagcccatgtactgcgcagggccgacttcagcgggcccatcacgtttacgtcgaggggctggcaagtggacgtggtgctcgctggcaacgggtccaccacagcgaacactttccatgccatgcttcgcggtgctctctgtgccagtaattttttgtcacgccatgctttttgtcacgccatgcttcgcggtgctctccgtgccagtaattttttgtagtacagtaatggttggtaagacatacgagctcgtgttcgtctgattggctaaaatacaaacattgttttgtatcggatcagaagtcgggacttgtcgcatggcgtattttttggtggagcgtatttttccatcgttatctgtaggtgtgtgtgcattaggtgtcgtctcgtagacagtggggcgatctccaagctgtctgcgagggcatgaaagctaggtatacgagacccgcagcatgagtgttgcgtatgtgctgctgtcgcgtgcttacttcgctaggctctcccctagcggccgtcaacaccacctccgagaatactatcgagggcgcgcacgctggttgcgctgcggatgctgctcaagtgcgcccgagacgtagccctcactacttcaccctctctgcttcgccaccacgccgggaaggggccatcgtctctctctagtgcgatctcacatttattgagcaatttctgactaacgttacccccgtatcgctcagtttttacttatcttttggtcattctcttgctcagatattgggaagcccttggcttactttttgggagggattttccaggttcgactccccctaatagggcaaggaccaatcaacctacactcggcgacaggttatatcggccaccctcgtttgtgtccgcaactttgccaatttttcgctggataatgaagtttgtcggcctctccacttcatcatctccacccaggggcaacatgtgttttgttacaatcattccagtgcattttgtatgcctcggggtggctgattatacttggcgcagtgccaaaatcacatagttgtatggcagccacctgataggctgggaattctcgcgggttaacacatgtagcggttttctactaatcaaagttcaaacatatctaaacaacgagcgccaactcgaaaaattggcaaagttgcggacacaaacgagggtggccgatataacctgtcgccgagtgtagcacagacccaatcatttggccaaggtggagatgtgaaggtaccgtcacggtactaccatgtacgctcgttttgcagatagaaacgacgatcccatctcgcccagggttcccggaaactattcggtgcaaagtccctttggtttgccaaagggaaacatctcccgtgcacgctacgcttactgttggccagtgagtgccctccggatcggtcagtttacaacccgctgctaaccccaagacccccctgccaagacttacaaatcatgcgtctgagctccttcctgcttgtggcaatggtcaccctggccgcaacctgctccaccactgcggtcgccgaggacgcggcgatgaccaagagcctgcctgccgattcgagtcgcatttgagccgcgtggacgacgaagagcgagtgttttctctttccagtctgaaaagcctcaagtcggcgttcggcaagaagtggactaaggtgaccgaggcgctcaagaagaagatcacgacgccgagcgaggcgtacaggaagaaggtggagaagaagatgcttcgcgacgagaacaacttcatccgccgctagaaattcaatacagtaccgcaatcgcaaaaatctactgcagcttcacaaaatgagtcccaacgtgcgtctcatctctaaaactttttataaaaagcacaataaaatcatattttttacagataccggttttcgtgagtgatggtcatccgtaacctggggggttacggttacgcgccagccgcattggtccgcaaactgcctgcggttatgacgtcggtgccggagacccgcggcgacgacggcgacgccgccatgctgatcacgttcggagacttctcgctggaggagacgcagaaggcgctggaggacggtgcgtaacgtgaccctacgcaccttcactcaccccggttatgcgtccagaggactgagaaactcaccacttcactcacttcgcagctgccgcagacatgacgagcgactcgcagccagaggcggcgaaggccgtggaggcgacgaccaagtcgtgggcgaaggcgctgggcgcccccaaggcccagccaaagcccgcgtggggaggcgctgccgccccttgggccgcggcggcgggcgtcaacggagctgccagcgcttctaaagccgtcagagatccggccaagccgctgccctttgaggaagctattcaggagacgctcaaggggctggacgtgtcggcgcccgccaaggagatgaagaagaggtgggaggagagagagaagaatgaggagagaagaggagaggctgatgatattttattttgttgcagaggcctggtgaaccagggcaacacgtgcttccagaatgtgatcatgcagtcggtgctggcctgcccgccgttcttgaagtgagttttctttagggggtcggagatgtcgaggggttcgcttgaggagatgcttacttattattttgtttgtggtgtgtagcttgttggcggagatttccgctgctacggctccgacgtcggagatgatggcgagtacgtcgacattcaaagcgtggcgacacatggtggccttcgcgcgtgaattcgaagagccgacgctggcgcagcgtacgtctgttaggatggattgggcgtgtcgtgtgtgcttgtttgtatattgacgttgtttttgatctgagcagtgcacttgcaggctgctagtggcgagcggaacccgaacgatatgcacggcaaggtgccgcaggcgattcggatcagcggctactttatggacgtgctcagcgcttttcagaagatgcgtggcgagcaggaggatgctctggagttcctcgagttcttcttggagtacctgcacagcgagtacgagaagagcggattggagctgcctgcgtcgtgcgaggagcagacgaagcgtagcgccgccaagaagcagaacggagcggtcgtggatgctgatttggaaaatgcccaagcttttgatgacggctgggcggaagttggcaagaagggcaagagcagcgtgctccgccagaaccctgtcgacacgattcgctcaccgatcaactggctgtttaagggtgcactgcgctcggagctcaaacaaaatggtaagaggcagagctccatcaccgtcgagccgttccactgcttgcacttgaacctggactacgaggcacaagacccatcgttcgtcacgggcgccaacggactggctaagccactcagcaccccgattacgatcgaggagatgatccgcaaatcgttcgacgtcgaggtgatcgaagacgtgaaccaggtccccacgatgaagaagttcacgacggtggagtctcttcctgttgtgctgacgctgagcgtcaagcgattcacgtaccacccggagcagggaccggtaaagctgcagcagttcgtgaagtacccgccgtccctggagttcccgacgcagttcatgtcgacgacctgccgggcggagaacgggatggatatccctggtgttgcgtctatcagtggtgccggcttctcgacccctccgatgtacgagctcttcgcggttgtgtcgcacctgggcaagttcgttgtgggtggccactacacgtgcgtgtgtcgtgacaacaaggaccagtggttccgctacgacgacgagcacgtgacctccatctcggaggccacagcgctcagcgaaaccgcctacttgttgttctacattcggacaaacaagcggcctactcctcgcgccccagcatctccgtctcctggatcagcctttatcaaggcgaagagctcaagcggctcaaaacagaaggctggcaacagcaacggcacgaccaaggttcctcccgatgggaagccatggaaacagcctgccgccgcaccaagcccacctccagcacctaaaccgattccaggaatgtcgccgaagaagcagcccgaggcaacaaaacccaagtcgaagaagcagaacaggaagaaaccagcatgaaagaagaacggaggaaaaaaaagaagtgaagagaagtagatagcatccaggtgacaaatagcccagcaaaacgaaaagttagatacattcaactcgtataggatgtacacttcgacagtcccatgtagatccgatacgtatttacgtgttcggatgcgcgacgcggaacgctgtggtggctgcgacgccgagccacacagccaaggacattgtgaagttcatcgcggagaagctggtgctggtacacggaccaacgcgggagatcgtgatggacgggcccccggagctcaatggtaaagtactccttttcaacttcaaaactgcaaatttgaagttcaattttgcaaaaggtaccgtataatacttcttccatccgacaaacattaatagccaatcattgagggacatatttttaaaaatatggggaaattgggtttcgggtccgttattttaaaataattccgaatcgggaccgtaattttcgacccaaacgtttttatgaaataatttagaattttgaaaaaaacgtacccaaagtgtaccctgttccaaaaatgtttcctgttatcaaactcttccctgttccaaagttgtaccacgagatatgaaataataaatattgtgctttgcaagcgttttgtcgttttgacttatagtcatgctcgaattgcttaagtacgagactgatttaaatctggagctcttcataaaaaatgcaactcgatcaagttgtaccttggtttgtatagagcaccacgcagatttattttattgccgcccgatttgccggtagaaaagcgcaattcggatcgttttattgtaaatcggtgaacagtgatgtcccatcctaatagcccatattactcattttttcaatgagaaaggggcaaattttatcggacactacctactggacaggaccaatcgccacaatttccgtcagtctcgaacatctcctctcctgcataagtgcgcaatgtactctcacgacttccgctggcgcgctgtctttcttgttcatgtgtatggcatctccctccagtacgtaagtgatatatttggacctactgtgagaactatacagagatggtattctttgttcttatctaagggagtggtagaagatgacgacagaaccacccgctcgtcacggtggccgtgtgacgtagtggagcgtgtgcggaagtatgttgagcaccatcccacattctatttagaggagctacaggactttatgaagcgcaccttccctatggtgaaaaatgtttcactgagtaccatttgtagagctttatattttgatatgaacttgactagaaaggtgctaatcaaagcggcaagagagtgtgtgccgcacgaagtgcatgcgtacaaggtgaagttagaggctatgtattcttacccagagcaattgctctttattgacgaaaccgcaaaagatgggcgtcacgcctatcggcgatacgcgtggtcaaaaaagaatacaaaggcggtggtacagttacctttcagtcgcggtaagcggttgtctattttggcagctttggaccatagtggatttgtcgcttgggactatcctgagggtacttacaccagaaactcctttcataaagcgtttgttgaaaaatcttacctcttctgaacccctggccgctgccacgttcaatagttgtaatggacaacgcaaaaaatcacatgtatcgagagctagaatcggtaagtcagtttgatagctttaacatttttttaagctgacaaatatatattttttttcaggccatccaccaagctggagcgaggctgctctaccttccaccgtactcacctcaattaaacccaatcgaggtttgttttggactactcaagcgctggatccagaagaaggcaaatctcatctttccgctgtacccagctttggtgctggatgtggcgatgcggtcctgctgtcgaagtcaccacccaagcaaacggaagggcgtactaaatctatatgcgcactgtggctacgatgacaagaaactccgatcttccgagtttattgtacaaccccagcacgccaactaatagtgacgatgaacaatagtttaacgaacgttgaagcttctgtattacctagcaagaactgcctctgtttagttttcagacatttggtggtcttcatccgggacgtcttcaccttgtggcatcatggcttcggggtgaaaaccgtgaaaaatccctctggtaaagatgtcgtgttgggggaggcccactgtaacggggttacacgcacaagtggctacagtcacttgttactgtaacagatgcgatgtctgttagaggttcgaacacttcctcgaccttggtgtaaggcacaccaatggctacatacatttatgaccaccacgacgggtggtccatacacatttaggattcctattgactgaaagtagcatcttttagccaatgagtgacttgcatgttagcagaatcctgccaaccagccgttggcagattcctagtttagaatattacatttagaggaagtcagaaacataaaacaaaaatagcagttctcattttaacccaaaagcattatttggatcgtttatttatatttatctatactcggaggcccgagtataattaactctaatttaaactaagctacgcttcctcacatacactcgcacacgtgtaagctaaagtagtgagccaaagtaggccactacacccaccgcttctcgttgggtcgagcgcttcacgcgcatcttcacccacgtgccaaagagctcgacttcaatttccacgacatcttcctccggttcggcagcagtatcctccaacgctgctaccgctgcatctagagctcttgcttgttgcatcgtattgtcctcaggaatcgcaaacggagtgccttcaggttggcgggcgcggtggatagcaaaatggtgagtggcaattggtccgaaccgctctctaccttctgcctgtaaggtcacgatctccgctgccgcggcacgaactcgatccgccgtggcccgacgaatcccatcagtaggccttaccaccgggacgagatagacgaaaaattcaaacacaaactgcgtatgaattggctcctcattggatgccagagccacgatgtcatcgtcggtaatgcacgcccatcgacgcttcaacagctccttgaaattgctaacggaaagaatcttgaagtcctgctgccgtgcatttttggtagccttgaagaacacgttctcgccttcgattgaactaggattgggcccaaactccggtccagtcaacagtcgaaagattttagcccgggcgacatcgaacccctctgcaacaacaaacgtaaggctcttccgaatgcccttacgggggcctctggagcgctcgccggttcggaacattaccacaccgcggagctgagaatctggtggcaagataccagcgcgaggcacgcccattctggaccttctacagagactctaaatcggcaagtagctgcctaatcgcacgcagcaaacagagcagtattagtgaagcagtaggcgccgacaacttgcattttgattaggcatagtaacttacagtcaaacgtactttggggtagcaggcaggtccacaaggacggtgctgtcgcgctgcaggtgaccggagcttcttctactggaagagacgaagctattgagctacagcacgcagcaaacagagcagtattagtgaagcagtaggcgccgacacacgcgtagttgttggtgtacccgttgctgatcgggtggcagatatgaggctaataaatcgagcaggacattggcccagtaggcgcccgatttagtgcaggatttctgatgactcgcatttttatgacctcactttgtttgtgttgctagatcgatctaaccactaaatcggaccggcaaaacttctgtaaagcacaatatatttccactgtagaaaatgctggtattatataaaataagcactaaaacagccgtttagggaaatgaatacgtcaaagcgtagggcggatactataatggcttcttcattataaacaatattcttgtacactttttttatcagtctacatattcatgtatgaatgtcaaatgcagttttatggcatgcttatacgtaattcaacgcgtttaaggtaatttacttgtagtatagcgcaaaacagcaatgctgaaattagtttcagcgtttataatcagaagtagagtgtgttggtaatattctctgaaatataaaagaatttttattgtgctttgcaaatgttttgtcgttttgacttggacctctcctcgatttatcattaagtcgaggtcgatttaataaaacgaagccaaagaaagggacagatcgatctatttaggccggctaataactcgagctacgacaatccaaatcagggctcgaggtcgatctcctggtggatctgggcagaacgaggtcgatctacggtaaatcgatcccttttgcgttttcaaaagcgcaattcgaggtcgatctaagtaaatcgagctaccgcctctgttttgtaccctgatttgtggaccggccttcctcgatctaggccataaaacggggcgccattttatctgcaaagcacaatatcactagtttgtaagcagtgaaaccttatcttgagcctaaacgattactaagtattgttttagcattgaacatgactttttatgtccattaagaaaaaaaaggaccgtaagatttgcaattgggtacggatggcaatagggtgtggaatagtttcagggtacactttgggtacagggaaccttggctttttaaaaaaaacgaaacgaacgtttgattagaaaattacggacccgattcggatttttttaaaataacggacccgaaacacaatttcccctaaaaatatctatatggagtgtttggattggctataaacaagcgtaaccctgtgtaaccactgaagattggtgtcggatgttaaaagtattatacggtaagatcaaagccgcacgagcagatcctaggctagtctcgtacttttatacactgattggtactctactatctagccaacaagcaatttacactctataatcacatctggtgatacttatcatgcagtttataatatgtgtttatagagtattgttgttttgaacttacaattgcagttttgaagttgaaaaggtgtattgtcccggccagaattgaagggcccgatttgaagcctcgatttgaacatgatggctacgactttccatatgcgatagttagatatagggtaaatcacacgcgttagattccaaaaatgtggtaaaaacggtccaattcgcagccgttttttcgttataggcgctcaaacatgaaggtttgaatcggccaagaagcatgagctcaaatgggctaggtcacgatagggttacgagaaatagcattctgtaattggttgatcttcagaaagcaaatgacttttggagtagtcgacaggactaggtttccttgccggacacgatcatgtgcttctcaccgaggctcaaaacatgccgctcaatcgtcctcttaggtggggcttccagcggcggaggcggtgtctgcatgcttccgctccctttgctttatgtgagtattttgagcccccacttgcctcaaacggagcaggcgatccctcgcaattgccaaaaatatgaaggtgttacaatttccgggcccttccattctggccgggacaatagtggaggcgctggtggacgcgctgtaggccaagcagctgacgccggtcccctattgccccgctctgttaggcctggtggagaggttccaccgcacctggaaggacatggtggcgatctacgtagcagaagcgcaagatgactgggatacgtgactgccgtgcggtgcgtatgcgtcagagctcggaatcgggtacccgaaccgagtaacgtacccacccgaaccgggtacacccgagttcgggtagggtccgggtacccgaaacgatccccgggtgaagtttgggtacccgaacgtaaagatagagtcatgtgaatggtttcgcagctctattcttatgatcttgaaatccgattttgtacggcttgtgcctttgaatttcgcaacgcctgacccaatgctcaagcatggaaaccgaggagccccctgatgcccgacgtggcgtctctactatagatgaagatcatgcaaaacgcgaccccccccccccaaatccatctatgctgaatggccttctaacggtgaggtcaaacgcagaactgatttaatggatgcaatgtcagcatttgcagaaaagacagtagttttttttcaatatacataattattgttttatatacttcggctttgacacccgcgactttcagtgttgacgggtgagatgactgtttttcattgtaacatcccggctccctctcagatgggccctctcctgggtcgaagctcgtatatcgacgacatcgcccatggtgcgcctacttgggagcagctgtgccaggatctgaacgcgccgctcttccgactacgttactggaatatctctgtgagtctccccaaagagtgaattctggaagttgtccattccgtacctctctcacgagattagtgctgagggtatccgggcgacccctaaaattgcgaggggggtccaagacttgccgttcccgacgacactgaaagtaaacgcagcagcggagccgtcggcttggcgccaatcaccgacacaatcgcctcctccaccttcggattcttggtcgccggcttcacgtggggacacgcagattgccccgtcttcctgccgcgcgctcacactgacaccacctcgggccgcaggtacagcgacacccccttcttcacttagcgcgtacgacgaaggatcacgacgtgctgcagacacgtgccggcgactgcgtgagcgaggccttttagccagcacagaagcgacgggtctagcagcgacagctgggcgccggccgcgtgaccgggagccttcggcacgtccaccagcaccaccgggtccagcagcgacaactgggcgccggccgcgggaaccggattcttcggcaggtccagtggcacctggttcagcgacgacggcttggtgtcggccacgtgggcggggtccttcggcgggtccagcagcaaccgcgtcgcggtagctgcgcccacgtcgaatgggttggctgggttcgcccatgcaattgtcatgcggcttgcttgtcgcggggcggtgacctcgaggagctgcatttgcggtcatcgttaagacgttgctgtggttcttctaaaggagaagtgggtggaggatacaagacctagctgatacctaaataacaccttgagacctaacagtgtgatccgcctgaaaaacctcgtttgacctgtatgtggcctgacctgtaatcgatccttcggcaccttaacacagccgcgcggaagaggtttttgacgaggccgagtttgagccagctacgctgcttcggttgggcccatactcaccaatgttgaacccaattgagaatgtgttctccacattcaagaccttggtgaaggcgtgcatgagggagcgccgcctcgatattttggccggcctgaaggagtgacgatgaaggaccatcgtcagtcgttcctgcacgaagcggctcacatgtcatgccgcaggccgcgagcaccgccaattgccgagccttttaccgccacacgcttcgcttccacttcatggtaagcagcatggacgacatgcctgtgggcacgtgagattacgcgctgtatatcaggtgctttatttgatttgcttttgtacgtaacctggcagttcatacttttaacgatttcaatgaatacgaatttgcccttcacgaatttgtttttgctcttgccgaactgtatttgcacaccgcgaattacgcctggaaaatgtgtacagtagtacctagcaggtcactttgccagagtgtcagagctatatattcaagtacggggactgctggcaaatgaacaatggtagggctaacaaaatacaactagaggcgaagctttggtctgggaggacagtgtagacttcctttgtgtgcctaaatttataaacgtggggtaggcaagaataatgcaacatgaaagttggtggcaagttttcaaaccctggtgtagcgcctttaagaaaaatggcgaagttaccgcgcaaaagacacaaaagaacttaaaggcgcgctcggccgggggctttgcccccggccgagcgagttgaggtcatgcattccagctatacaaatttacacaagaaggattcatggggtttagtcaatttacagacgcaggaaagagtgcaatccgttagttgttatttcaatgattttgagtaaatgttagcttataacgaaaaaaatgcagctattctagttatgattttcggaataaatttcataaattcactacagtgtgtggtacacgctacggatacggtcgacattctgggaacaaccagccacgaaatgtacaaactccttgatgttacggtagccattatctgtggactatggactcaggcgacatttgtcaattaaagttgggggggggggctcccggccgctgaaataaaattggttcagccagctaaagctgccctcccagtataaaattttggtagttgactacattcttcctgcaccacccgatacttacgtaccttatatccatcgaaggattattgtttcgttacctttggattggatcatatacggaactgatcagagatttgaacagatcttctaaaaggtgttctgggggttgcacctccagacccccgcataaagaaaactaactccgagttgcggcaacgggtccgttcgctggaatgctcactgccgtagcatatgttttgtccatacaaaaaccaagataagacacctgttccattcactgatcagttccgtatatgatcaaaaaaaatctagctattgtttcacctgtttagttagctgttgggcgcggtcacagcgtcatcacgaggatctgcgcacggcaccagtaatattggacgtagcaccaaacgtttacggaaaaccaccaaataattccggacgaaacacccaccaagcgttaccggacttccaccaatgaacaccgtttgcaccaccaattatgtcgtacagtactcagatcgccactaccgtcgcactaacccattcgatggcttgcagcccgccgggccttcgtgcagtgccaatccacgtacaactgacttacacaggccttggtatctctcctgcggttcgattctgtaacagaatttctgtttcggctcagtgtcgattttttcatccattgagcagctgaaggcgtcatgtccgacgctgatgacggggagttcgaagactggcgcttgatttggcggaaggatcgcgctcttgaggaccgcgacgagtacttacgtactgttcttccacgttatgctaccgacaagcacaacagggtcccgtgtaccatcgaccatctcgcgaaggtgaacccgtcggacgctgacattgccttgcaactcaccacacactacatgggatctagcctaacgctgtgtcgctcggagcgctgccgaacaaccgccgacggcgaaaaatgctggtgtcgatacaagatcaacacatgcgaggatggcaacacgacaatcgtttttcaacaaggcgctcacgtcatggacggcctctctgctctgtcacctctccgggcccgcatcactccagcgatgaaggtggtgcttgaggaccagctggaacggcatcgtagttagacccctttgccgttactgtcaacactgtcttacaagattgccaacatggagcttcgtcgaccggagccgagctacaaccaagtggaatacttcttgcgagtgtggcgtgacaaccattctggagcagacacgcatcaggtctcgagtgcgatcgacccgtcattgcatgatgaagttggactacatgggggatcccctcacgttattgccttgatgatggtggcttgaatttatgcacacgccggttgggtccagttggtactttgcatgaggtgttcgacctgtaagaaggtgttcagacatgaccacacgcaatcagtattgttacttcatcaatgcgagtaattgtctccttacattgtcgagaggacagccgtatgcacatcttctccatgaatggagctcgtcgtacgaagcgggattcaccagacgagcagtcatgtccaccacacacacgtccgccgtcggtacacggaacgacgtgcgcgtcagctttccgttcaggtccgggatcaccttgcctacagcctcggcggcgcccgttgaggtggggatgatgttgaagtacgcgccatggccgccgcgccagtccttcttcgacggaccgtccaccgtcatctgcggcgccgtcgcagtgtgcaccgtcgtcatcagaccctccttgatgccgaacttgccgtgcgccaccttggccagcggcgccagacagtgcgtcgtgcacgacctggagcgcgaacgtctcgctcgcggtcatgggcttgccgtccaggtcatccaccaacagacgcgcagccgtcttctgctgctcgcccagcgtcgtgccgtaatcggacacgtagtacttatcgtacgtcttctgcagcttgcgtacgactggcatccctcttcgggcacgccattcttctgaatgtagcggtaggcctccagttggtcgccgccgtggcacccgttgttcttctttgttgaggatgacctacggagacagcaccaccactcagcacctccatcgacggcttgttgcccaggttgcgctcctgagcgatcatgatgggtccgccaccgccgaagtcgccactgcagagcaataaacaataacaaaagaataataacatatctagagagaaatgatacattggaggatcgatccgatcatcttcaaggtgtttatgtgcttaccgaaggaccagcatgagctgtaatagtgcgggatgtgcaggttacgcgagatggtcatgttgttggtgttgtcgacgttgcgccaggcgaagttcttgggcagcttggccacgtccagcacgccgtgcggccgcgggtacgaggctccgcggagcggtcggagctgcgccagtagccgtagccgccggtgttcgtgcgcaccggcagcgtcttgatgccgaacctcgatcttagtttaggcttaggtgggtgatttgacggaatgagttggtgttcttccgggatacgttggttggtgaaccgcacgcgtgtagttggtgattttccagattggttggtgttttgcacgaaattatttggtgcttttcaggaaaacgttggtatccaagacgggtactccgccatcaccagacgatactgcggcgccggcaggatccgatcctggtgccaaaccaggcaccggtgccgatgccaatctcgacgctgagctcctggagcagaagcccagcgaatgaccgagcgcggcgtgtgcattggaggcagcagagcagcactcaacgacggcagtggacaagcggcacgcggcagcagcgaggactgggcaagcggcacgcagcagcaacgaggagtggctgccggcaagcagcagcggcagccattggagaaccggtggcgcaggagttgctgccccaaggaggaacgatgtctgtcaggatgaactctaactacttcgcaacttaccttacgagctcaacttgcgatattagctaacaagaaagtggtcggttaagtacgaagaagagcgagtgggttttcgaaccgagccagaacagcgagaaccgcccattcgccgtttggccgccagcaagcagaccaccgacccaagacgagctcacagcccaaagcaactaggttgccaccgagagaaacatgctttccgtcgtctcgcacagacccgagcccccctccaagaatcttcccaagcgtgtgtcgcaggaccctgcgctcgggggacggactgttcgccttgaggcgccagacgagctggcaggcgactggtatgacccggtctatgcgacgctgtcgaaggagaccaagctgcttcaaccgactgaccgctgaccgtttgttgctgaggatggcggtctccgccggcccgcctggcgagtgacgctcacatttttgaggcatggacagcgccgtgacgagcttccacgcgcgctgcaggagcacgtgaacgtccagttctggatccctcgctgggggctgacactcccaagccgcgacctctcgggcgagctcctggaacgacccctgctgtcccttttcgcttcgtgggggtgtcggagttctttgtggcatcccccatctgcgacaccaagtttgtgcgtcaagtcgccgcaggctccctgtgtgggcaggtggtggcgtactcgcctgcctcttctctcgcgctggtggatgacattgacgttttccgggagcctggctccaggttcatctgctacgtggccattcggcacttcgtgagtgaagccaggcagatcgtggtggtccctttggacgacgtgcgcgtcaaccacatcagccgcgctgaatacgtgctcggattccgtcaccggcaacctcaacctacctcgcctggcgagtttacgaacctgtggaatagtattcctgcgctcagtaataatgatgcatcgacggttatgcatcatattgccgcagcattttcctctactgtgttggacctttgcgccggccgggtcgcgttcattactccacggggggagaaaacttcgactacggtgacaaacttcgttctggacgccaagcgccttcctgagatggacgtcgaccaggagagcctcccgccgccagtcctccctctgttgacttcggacgagacgcggctgaccccgattgacgagctctccctcttggccaggccgagtgagtcggtttcgtcaggtgcgggtccgcgtcctgatgcttcgaccgctggcccaggacccggtcccaatacaaactcgacgtttcagcacccggacaattcgcttgttcgtgtcttactcgaacagcagagggcatctatggaagccacgcaagctatgatccgacagttgcccgatctcacgtcggccgtgctccagcgtcctgcacagccacagcctgcgctcgctgctactgaggttactacggctggcgctgaggcacccacttcgatgatcccacggcaccacggggacagcgtctcaacccgtcgtcccgcgagggcctttgcgctcagcatgctggtgaccaccgcccgcgtggctacaatcgtttacgatcccgatcctgtcggcggctgtctcgccgtcgaacctcgaacctcgcgatcgcactcacgctcgccgtgccgagcgcctaaccggcgcttccgtagtcgaactcgatctcggggccgccaccgccgtatgcatcgtcgctcccggtctcggtctcccaaccggcgctcagagcaacgccgatcgggatcacgcggtcgctctccgacaggttaccgccctactggggccagtgcttttcggccaacggagtacgaggcccgagtccatgatgtagcccacgtggggccctcgggtacggaatcctttgatcgttttcatgctatgacaccccaggacagagtctgctccatgcttcaacgagagcgttttcgaaaccgatacatagtcaccaaggtgaccatcaagatgctgtacgcgatcaactttgaggggcgacccattgaccactttttattctctgaggatccctttaactttgcccagggcagatttgtcatccatgacgacacccaatggagtgggcctgacccagctcctcttgcccagattcgccgagcggatcagctccaccacgtgctatacgtcatccaggatgccgcagcggaatggtatacgaccgatgtggctagggtgttccgaactgttcacagcgacgctgtcaacaacgtcccacacctggcgcctccgcaagtgatcaacgccatgtgcaacttgtaccaggcagtattcggcgagctctttgatgatattcttcgccgtgtaccgagccgggatctggagccccgtgcgcgacgcgttctcagccgcgatttccaagcctatcagcagtacgtgacacgggtgctcaacgacgcagtcgtccataccgtcctcagcggaccccaaactggatcacgtgattcccagcgtccggcgcagcctcgttccaagaatcgtcgacagtcccagccggctaaccggcctggccagccttcggtcattccgacggccatttgtagccaaatcccagtgatcaacgagtccccgctctgtatccactaccaggtagccaaggactgttcgttccccaggtgttcccacacccattcgctccacagactcccgccagacgttttgcagtgggtggttcaacgccatggtgcgctcaagagtgagcacccacagcatgcgtgaggatgcggggacggtggtgttcgcatagcaacattatccattgacaattcgactttgccgcttacctttccgtccgtgaacgatgttgcgtctgacgtgccactagcgccagtacatggctcgatgtctactccggcgatatcagatatccgtccaccaagtaacccagcgatggcttcagagcacgtcgtccttgtccctggggcgccatcatcggcggctacagcatctgatgccacggtgccagtcaccccgccagcgacgtctaatgtgtccgacacttttgcgccggacccccgcccatcgacgatagcgacgtcagatgttctcgtgccgtgcacaagtccagcggcgaccacggcgtcgaccggtccggcacctgacgcgccgccatccgtgacatcgcctacaatggcgcaggacgcctgtccgggtacttttagtgtgtctgactcgcccacagctttggtacttggggttgccgaccccgtcaggctggatacccgattacccgtgtctttggtgtctgacacctcacccacccacgcatccaacctcttcgcgtcgttcgacggtgggtgtcggcctacagagcgtcgaagtgcctacgcctggtgcgtttggagttccgagtatcagctactccgctaggaggcgcgaccatttgccattgcggagtcaaacaattcgatggaggcccagggcttcttggcgtgtctacgttgggttcgggacaacctccccggccgacgtatccatgtgtttggcgactcaaagttgatcatctaacaagccttgatgcaggcggcctgcaaggcggccgatctccgtccgctcatagccgcaatcagatccatgggggcgggcttgcccctcctttatttgcggcatgtgcgacgcgggtacaacattgcggtggacgctttgtgtaactgagtcatggacacggccccatcggatgtcaattgtacgcattgcgattcctgctggccgacgacagctccttcgaatatggctctgagcccggctgtgcttcttccattccaggcttcccttgatgagggcgtggaccatgctgcggttaactggtctctcgtgcttcgggagcttgcattggtgacccacctcatccgttctcgcttcgtgtcgaaccgtgcagatcgtcttcactacccggccacggtcaatcctgccgcccctgaccaggttggcacggtcgcgcgattattggattcagaattcgacacgaacgtcaaacgttcttgtatcatcgagggtagacccagatgcgttccagcggcagcatttcgaggcctccaggaggcggcgcacctcgttggtacctccttcccgatgcaaacagcgttcctggatcctggccctgggcccttaaccgttccatccgtggatctcggcatcctggatgccctcattgccgacgatcgatttgggattgcaggcacactcaagctcttccggggtcagacctcattggaccctcggcctaacaaggttctacggccctggctctatcgggaccacctttcgacgtaccctctgttacaactgctgtgtgccatcgctgaggaaggtatcgtgtcaccatggattagtacacaacatcgccgcgggctcggccggtcccggacaactacgcgggtgccgaagatggtgcgcggattgtgacggacaagcttctcgtggactactacaaggtcatcgctactatcgccacgctgattcaggacccggagtttcactcgagcgccttcgcgctcgttccgaaaaaggataaacctctccacctcgacgtacgcatcattcataacctctcggcgccgcctggtgtatctgtcaacgatcagaccaactcctcggtctcgccagacgcgacttgggaccccttcgaggctattgctctccgtgtgcgcgacctgcgtcgtcggttcccgggctttgccatctacgccatggtcgctgacatcgccgacgcctttcaccacgtcccagtacacgcagatcacgcgtcgacgtttggggggaaactaccacggtcatcggatggcatagtgccgtgttctgctggacatcgtctcccggattctttgcggtttttggtaacgctgtcagacactaccaacgcacaggggcatcacgaatcttggggttcctgaaaccattctgggtcttccaatgggtcgacgacatcatcctcattgaagtgaacatcggtgaccgccttctgaaggcagagaaacgtatcagagacggtatcaaacttgtgttcggctccgccggctggcacgaaggcaagttcacgacctggtcgcgacgtttccacgcagtcatcattgactgggatatcccagctgaacgcatcactgttcctcagaggaaaatcggcaaggtgcactcaacccttgcgggcgccctccagaagaagcagttttccctcaagcagttggacagtatcgtggggtactcagacacgtgatcagcttcattcccattaccaagccgttcattcaacgtttggtagccgtgcagacggattgtcgcctacgacacaagatgggagtgccgatgacagaatcctgcggaaggatattgtctggtggaacggcctggtcttccagaacgagtgttcccatggaactattcgaaagggaggttaaatccggtgacatttggctactggagagcgaacccaaggcactggtactcacgaacatgcgtctcagggaaagggtcgtgttcattcatgccgactgtgcagttgacgtctccagtgtcgccctagcgatgtcgagagcggtacaaacttggggtccaagacttcaacgacaggacgcctggcgccacatcacggttcacagccccagtcggtggataacccgaaccgtggagagaatgagctgtgactccgaggcaggtcaggatctgctgcgccagtgcgccctcaccgccttcaccttggaactcacacgttccggagaagcattgagcagaccacaaggtgtgatgtacacgcccgaactaacagttattcttcctcacagagagacacagaagcatcgagcagaagccaaagcaactcaaggaagcgtccgtatccgggggaacactcgggcgatacagcaagaaattcaaacactgggagacgttctacaatggattcggcttcccagtgtggatcgacgacctgtccagggctcagcaagccaggatggttggattatacgccgggctgtgtgtgtcagaaggtcacaacaagtccaggacagggaataagtaccaaacctttgacggaaagatggcagcggtggcattcgcacacaaggcagttcggaacgctaagctcgactaccatgatacggaatttgagctcgtcgctcaaggatacaagcgaaccaacagtcatgtggaccggaagcagccagttactacaccgatgtttctcaagatgcgggagctcgtagctcatgagggtccgcaagccaggctgttgtggagctccgtcgtacttgggttcttcttcctcgacagaagctcagagctatggggcccggtcaaacccgacatgtcgacaggatttgaaagagtccactgtgtcaaggcccagaatatgatactcaggaacaagcaaggtcaacaggtaggctcagagtctacccaagtgcactccgtcgaaatcatattcgaatcgcacaagggcgatcgaatcggccaaggcagtaccatacggcactatctatcaaacaacccgacactttgcccggtggaagccacgcaagaatgcatgcggatacgagctcagtggataacggagaacaagatcctgggtccatttcttacctccgtatcaaggaaggcaacgatcaagaggtcaaaggtggccaacctcatctaggcggcggcaagaagcctggggctatccccaaaggattattcggcccattcacttcggatcagaggggcctgtgctctactagccgctggtaaaagtgacctggtcattcggctaatgggcaggtggtccggctggtgtttcacagtctacacgcgattacaaccaggtatgattcgcgacgcagcacgtagcatgatcaaggcctcgacatgggagcaccacgagccaaggtacgcagtactcgagggggatccaacgagcctaattcatcgagctaatcaagtctacttgccccactcaaggtgatggtcgaaggaggaaagtggtcggttaagtacgaagaagagcgagtcgctgaaccgtgggttttcgaaccgagccagaacagcgagaaccgcccattcgccgtttggccaccagcaagcagaccaccgacgccaagacgagctcagagcccaaagcaaccatgttgccaccgagagaaacattttttttctctctcaagacttgattagcggctcaagtagcaagtccttctaggacgggttttccccctttcataagattttgtcccgtggtaggacttagaagtaggatccaacgagcctaactcatcgagctaatcaagtctaatcaagatgatggtcgaaggaggaaagacgcaaaaacaaaaaaagcgttctcaggaattcgttgggtctattaatacagctacggtatctaatcttggtttgcaagtggagatatgaaaatttcattgagacggtttcaaacgaaaagaatgcttgcgaacctaagtacgaatcgcgatttaaccgcatcaatcgaaataggcgtgtcttgtgcttcgtttaagctatcgaatgctgtgaaatgttaagaactcgcggagtgacatcgatctagaaaaattatctccattttcggacccccaaaattcacgattttatttggggcgtgtggcctcaatattttttcaattttaacgtattgtatattatcggaaatctcgcgctaaaagcaagcgaatcagagttattttacgctttttacgtgtgcttttcactttcgaaattttgatgtccgattatttccgaaaggtgattggtcaacttcaaacgcgattatctcgataactccaaatggcgcctaagcatcgtctcaaatatagatcggctgtggtttgattaatactgcaagtaaaacctcatgcacgcagcaggttctcgtcattattattgcgtgtcttgatggaggtcttgccaagaccgtcttgtagcgacttgtctccctaacgagtctagtttttgagagctttgtagggcctgtaaaacaacaaacaaagtagcgcgcttacaccatgttcaacaccattctctctcctcaacatgacaacaaccccctacctgcacggctgttccgtccaacagcaagcaacacagcgctgacaaaatagatttcacacaacatgtgcacttcgacagtcccatatatagatccgatacgtatttacgtgtcgagatgagcgaaaagttcgaaagatcggttgtcgaccggtcatggaagttccgacgttgctgctgctgatctcgagcgccctctgcatcgcaagcttcgcaatatctgcagactctacgctatcactggatgcaatcagttgcctcactgagggcccgtcatgtggagcgcaacaccaacggcaagatgtcgatccattgacaggatatcggataatggacccgaaggaaggcgcagtggagacggcgccactggaggtcagactctttgtcgatacaagcagctccaaggagttcgacgcctattatgcggacgctcgcatctgtgtggagctgaatggactctggaagaagtgcaagtcgacggggggacctccaatcatcttccggttgctgcccgaggggaactacactgccattgcctacatcacggacaagacggagcaggctcgataccacgaaactacaccggttgggttcactgtggtggggttaagtgagtttaacctccgtaacgcgttactggcggagaggagtcggatagagcagcagttccccgaggatatcgatctgctacgttgggcggagctggaaaatggagcgggtattgatggcaagactgatgatggtaatttagtcttaccacgcgctagtgtgacgtcgacaaagagtccgatgcttgtgattggggtgaagactgcagtggtgacgagcttgccgcgtcgacaagcgattcgagatacgtgggggaatccagccacacttccccacgacgtcaaggttcttttccttggttgcgagccgaatatgacagtgttccgatacgaacatgaacgacgacgagtattaaaggcattggcgaaggagagagcggtgtataaggatcttctcactgaagaactggagtgcacggactcgtacaggaatttatccaagaaagttaagtcgttcatgcacttagcagcggcagagttccccgacgccaagtttgtcatgcttgtggacgacgatgtttacgttaaagtggatcaacttgtccaacacctgcgcttggctaacgttccgcgactgtattttggagaagtttgggcagacaagtttgcgaataaacaagagcctatccgcgatccagacagcccgtatcatttaccaaaggaccagtatccgatgagtggcttactgccttatggatctggaccgcactatgctgtatcaatggacggagtacggttcatcgccaagaactgctggaaactgcgcagcatgaacggtctggaggacgtgagctcaggattttggcttcgtcttatgcagattccagcacagcatacagcagaattctcgagtatccgctcttcgatgagctgtgaagacgatctggtgtcatttgctgacctctcgccgctgggcatccgatcaattcatgcgaacgttgtcaacaagaggcgattctgccacggcttccactccgtcacgtggcatcgacacctgaattccatccccaacctcaagcaaattcttcagcggtcaactcaacacgctgtacactcgacaccactgcaagtggagacatacgtcgactcttctgatccgctgcgattcgtagtgatcgtctccaccccgtccaaggctgggatgaagtttggattcactccatcaacagaatcgaccgacgacttcatacaaagaatctgtccccaactctctcacgactccgcaccctgtgaagctgtcagccttactttcgtcaaacaacttgaaaaagctcttcagtaaatgttatgaggtcatctatcgtacatgagttcaacacgtccactgtcccgtatcgtgaatcacgattcgtgatccaggtcatcaaaaagatcgtcaaagatctagatctcgctccgcatggaagtcccaaggttgttgctgttggtgctgctggccacaagcactctgcgcgtatcgagcgcatcgttgacgacagactctccattgccacgaccgtcactcgaagcctcgacaagcatacgccacagcaatgcagtggatcgagacgaaagcgatccgttgataagcttttggatcgtgaatcctgaaaatgacgccgtgaccgagctcccaattgagattcgattcggaatcaaggcaactggggccgaggagtttcaagagttttacagggatgtacttttatgtgtagagctcaacggactgcacaagaagtgcaagaggctagaagatccaccgattgtttacacatcgctgcccgaaggcaactacacggcgacggcgtacatcactgacgcaacagaatgggcctatcaccatgagaccgaaagcgttgagatcacattattgagctcagctgagtacaagttgcacaacgcacgacttgctgacaacagtcgaatggagcaacatttttcgaaggacatcgactcttgcagtgggcagatcaggagaagcaagtggccgtcaaggacaacgaagacggtggagatgtggtgctgcaacgtggtcacgtgtcgtttgctaccagtcccatgcttgtcattggcgtctctccgctcgtgatcattctgaaaatctgcagcattcggatcgcagcccagaaacaaaaccttgacgtcgtgaggaagcttgtctggatccgcccacgagtcgcgtatcgcttgtcgacgatggaagttccttaccactgccgtcttcgcgttctggcggctgtggcgaaggagagaacgatatacagaaatcttctcacggaggagttgggatgcacggacggatacaaaaatctaaccgacaaggcggtgtccttcatggatctagcagtcaccgaattccccagcgccaagtttgtgatggtcattgatgatgacgtgtacgtgaaagttgaccagttagccgagaatctacgagtggcgaacagcacggggctatactttggcgaagtttgggctgtggtgttcggaaacaagcagaagcccattcgggaccaaagcagccagtactatctcccagaagaccagtatcccatgcgtggcttgctgccttacgtagctggaccccacagtgttatctcgatggacggcgtccggttcatcgccaaaaactactggcgtctgcggagtttgaacggcttggacgacgtgagtgtggggcttcggctgtggagtatgcagctgcgacaacagcacacgcggcagttctccagtgttcgcgcctccacgaactgcagtgacgacctcgtgtcgttcgtagatcttccgtcgctggggatccgctccattcacgccaacctgatcaacaaccggagcttttgtcctggcttccactccgtcacgtggcaccagaacctgaattcggctccaaccatggcagaaatgctgcgacgcccaactcaagaggaaacacagtcaacgcctctgcaactcgagacgcaccttgatagtcctgagaaggtgatagtcattgtctccagcacgtccaacgcgggactaaagatgcagttcactccatcagcagaattcgtcaacgccttcacccaccgactctgctccaagcttccccagtgtttccccacctctccgccatgccaagctctcactccagctcttgccaaaatcttcgaggtatagttaatgggtctagcggaggaaagtgtatgtatttattcccgttgattttattgctccaccacgaagtaggaagtcggatgcctttgctctatgagaagggagggagagatacaccttcgccgcaatatatctagccgaagttgacaaacggctggctcagtcctcctacttgtggctgctgctgttgcagcggcggcggtcgctgttgttgctgttgctgctgctggaagcctccctggttcatgtgcatgcccatggggttcatccccatcggctgtccctggaatcccatcggcgcagcgccacctacagcaaaccagtagaccaacaacgttagcattcctatcaccaccttaacctgtcacgtcacggcacgtacccatcatcatgccgttctgctgcgcgccgaacatttggttctgcatggggtaccccatcatcatgttgggctgctgggccatcatgttgggctgctgagccatcatggggttcatgaatccctgtcctccggccatgggcatgcccatcggcatccccatgcccatggggcgcggggccatcatgcccatgccggggttcatcccgttcatctgcatgttcatcatgggcgcgggcgccattcctgtctgaggcgggaacgcgttctgctgctgctgaggctgctggggcgtctgctgcgcggcagatccgaagctcgccatgatgttggccatcttgttcatgtgctggtccgccgggttgggcggctgcggggcgaacgcgtccttaaagccggactgcgcgttggtcgagcccccaaacgacgcccactcgtcctgcttgggcgccgcagcaggcgccgccgccgccgccaccggggcatccactaagctggcagtgacaggtttagccgccggcacgggcgcgctaaacacgtcgaaagacaggatatcgttcgtcaccgcgggctgctgcgccgtgggcgtggcctccctcgaggccgtgcgagacccgtgcctggatccgtgacgcgatccggagctgcgctccttgtccttgcggcgctcgcgacggcgctcgcgctcgtcctgttcatcatcctcgtcctcgtcgctgctgtgcttcttgcggcgtgacgcgcgctcgtcgttctcgccgcgcggggcctcgcccacgaagcgcttgcgctcgtacttctcgcggatccacatctccttctcgcgcaccgacgagtgctcggtcgggatgcggtagtcgcgcggcacgttggcctcgtagtaggccttggcgcgcgcgttgccccagcgctgcatctgctgcacctgctccgaggtccacgagtccaggttgacgctgcgcacgaaggtcaggtgcacgcccaggctgcggtggatgcccgagcacgcgatgcagatgaagacgccgaggttgatggaggcccagcgcggcccgcggcagccgcagtcggcgcagaacttgttctcctcgagcttcatgagctcgttcagctgcttcttgagcttcgtctggtcgtcgggcgcgcgcgcgcctccggagcggctcatggcggcagtcgcgcgtgtggaggggaggggggaggcggagagatggagactgcttggggcgagctggcctggtgccacgaagaggcaaaattagagctgaaactcccgacaggtgacttgaaggaagtatgccggggggatcaagatatagaggtagatacactttgaaaactgataattgtatccatctgacggacgttgaagctgtatgagtacgcctcactcgggtctcgaattggtgctagcggcgttggatgcagtgtgtctgagagttcgccaacgtacagacctctgtgttgcccagcctggctgatgtctgcaattatgtggccgactcttacgtacacgtcgtcgtccgtgaccatctcgacttccagccactcgaagaacgcgctcactttctccgtcagtagcgtgtacttgtcctgacactcaagctcaacgtcagcaagtctcctgcattcacgattcgctggcgctcaaggtcgtcggagatactgtccactacaggaatgcatccgaggaaaaacaccttcgcattagaaggtaagtcactcttcctcgcccaggtttcgcgtatggcttggcgctgagcaaagttggtcaatacggcggtcttgatgccaatgaccagctttaactcgtccgagtgtgcctcgttggcaaatcgtagcgaatcttcggacgtgttgtacgggtagctcttatcggactgctgctgctctgcccactgcaagacgcccaggtcccgtggaaacttgttgtcggcccgaatttgttcacgttgttgttgaatatgcgcgtcaaagttctcggcactcggcagcgagaacgaaataggattcgtctcgtggtatctcgtcactccatcgaaaataaaggcgtgagcaacgtgtctgccttccggtagctcttggaatatgattctcagctgcagtatcggtgagcatttcgttttgactccatccagctccacacagacaaacatggctccgtattgagatttgagggcgtcaaaactcacagcgtcgatgctgaacttgaatcggagaggcagcgccgagaccccgccatctcgaggatactccaccttgaattcccacacagggtcgtcctccacgattgatacacctcgtgcaagtgcaaatgcggcacaacacgcgagcaatacgaggagaaacagcacaagccttgacatggctacaccgtatcttcgaaaaagtggaaacgaatctgattccatacctgagaacggtatcttttggtcaaaggggcgatgaaccgatgccgtcaagcgtgtcaagtcctcatcacttgctggctgctatggagtttgcgtgctgcggcggtctcgccaaagtctcgtggtatcggtgatcagccccgtcaagttgacttggattccaatggagttgtcgaaattcaggaaccggagcctataattgccaagtttcgcgtcatttatccgtcgaatggcgatgtggaaccgcttccgctcagttttcgccttggcatcgaggtgacgagcgccagtaaatttcacgcacaatatggagacaagctcctgtgtgtggagctgaacgccaagtggaaaaagtgcagtctattggctgatcctgtggctgtgtttgatgatctgcctgaagggaaatacggagctcgagctttcattacggatagagaaggcagctttcggtaccatgagacgccagagctgacactgacgattgtaagcgacgaaacattcgaggagtacagcgttgcgatgctgaaacagacggatcaaagtcaagacctgccccagtggaatgatctcgcgcaatgggctcgatggcagaagatttttgactcggatctcgatgagatgccttcgagctctctgctatctgctgaaggtggcgactttcttcttgttattggagtcaaaacggcagtgctggagggcttcgaccgtcgccaagctattcgcgagacgtggtcgagtaaacctgaacttccacgtgatgtaaaagtgtattttgtcgggtgtgcgtcgaactttgatgccatttcaagtgatgagaagcgaaatcaggtccagagtgcgatcaactatgaaaagcaagtgtatcgagatctacttacggatgagcttctgtgcgaagactggaacggaaaccaagtgaacaaagtgaaggcctttctggacttcgccgcgcagacataccggcatacaccgttcgtagtgatagcagatgacactatttacctacgagctgaccgactagccaacgacttgcgaatggaaaatcggacgcagcgactgtacctaggacaagtgctggataatcgcagtcaacctggcgtgtttccgtcggaacatcgctacattccctcgaagcgctactcgctccacaactatccgtcattcgcgtccagctcacactacgtactgtcgatgggatgcgcgcgctttattgcaaagaatagtgcgcggttgcaaggcttggatggacaggatggcgtcagcgtcgcactttggcttctcactattcaggttcacgtggagcacacgaaggcgttttcagacctccaagatgaagattgcgacaatgggtttctgtcgcttgctggcttatcttcatcgggcattcagaagattcacgcgaatgttgttgagcgacgtccattctgctacggtctcaaccgagatttatttctgaatattggcgccaatgctgaccgatcgagtcaactagcggtgaatttgctggaaattgagtcatttgttcacgacctcaatgcgtccgagtacctgttcgtcacaagcctcatctcgacgcgtgataacgctggcgtcaaggtttcgtattacccctcggcggagacgtttgcctcgtactcccggcgagcatgtgatgagacgcgtcgattcttactcgatacagaaatcaaagcgtggatgtgccctgccatcgcccagaaactccgggcccgagtccagcaagagttcgagattgccaagacctcactgacgatcaaccccgcgtttctcgagttgtggcggcacaatttgttcgttgcaagtgcggacaaccccttcattatcgggtacacgccagaatcctcgtacgcgtcgattgttttcgagtgcatattcaagaccatactcgagcatcacggccggccaattctagtagtctccgagaaggctctgcacgtgaactatcagaaccatccggacgtatttatcttctccatattcgatgcagactgtgacccaatgtcgaaccctggatgcccagaaatgatcgcgcactatatggatcagtacttgctcccggtggattcttcctcgaagttgatgatgatatctggtgaagccatcgacacccaagctttggatgatcgagtccctttgctatcctcagtctccagtgttacacgaacgcagcacgtgtacttacccgtggttagtatttcgttcgcagagagactgcagcatattcccctggatctactgaccccagcaccacccgatcccatcagccgccggttctgtgcgtacttgtacgcgcgctgtgagaggccgcaccgggagcgcatgtttgatctattgaacgctttggaaccggtcgatgcgctggggatatgcgcagggtcatcaagaccgccggataaagcgtataaagcatctcgctacttcaaatggttcaacgatgaggccatcgcctcgtaccagcgctacaagttcgtggtcgcgttcgagaactcggctgagcccgggtacgtgacggaaaagctcgcgaatcctttgctggcgggtagtatccccatttacctgggcaactcgactactgcttcggagctatttaatcctgacagctacatcgactgtgggcgctttggcaaactggaagaatgcgccgagtttgtcgttcgcgtccacaactccccagagctgtatgcgaaaatgcggaatgcacctccgatacgaaatatgacggcgttcactgaagccttctcgtggcacccttcagttccaagccggggtttagcggataaagtggctaaaatgcttttcctaaatacttctaagtagaatttgtaggggcaggaggaaataccatcatggttctattggtatttctttgtttactgttgacataattaaagtatcgagaaacgcgattccgctaggtaattgagaaacgaggtgtcgttagttaaatcaataaaaaagaagctgcgagccgggtatttgactaggttgttttttgggaattggagtctctgtgtaacgctaacgccctagcaccctgacaacactacagtactaacttagaactatgtactcctcaatgtcgaaggtaccactttggactggtcacaggaggtggacaagaccaaccaggtggtataaggccaagatcacaactcaaagagccaacaaagggcgacgtattatccagagagcaagaaataagtggatcgatgaacattgccgaatgggcaaggcgttgaatgagttgaaatgggagtcgatacgtcatattgtggggactacaacacacgaccatcagctcctccatcggctcaaactgcagagatgtagtgtagtgtggagccataagcacagcttcccacattttctgggcgtgtccggtggctcgaacagcatgggcttgttttcgagaaggctggctgcagctaaatggaggcccagacattgggtcgctatctgaaatctttactttggagcttaaactacccccggaacaactgcgagcccatgttgagcgcaatgctaagaagggaggtcagctgctgcaaggttcactagggctggtggcagaaattgcaaataaatactggagagcaggtgtgacggctacaattggagctatctggcgttgtcggctggatgcattatacccgaacggtgaaacagcagccgagggcgaggcggtaacgagggccaagcttcggcgcacctacacgcaggtcgcgttagatacgcccctcacacaagaatcctacgtggaatggctaatcacaaagttgatatacgccaggctgctgaaagaggcaatgacgcctacaatgggcggaccagcagtatcttgccaggtagtcggcatgtttcatggttgcacgggcggaatcccaagacgaaacggagcaggcggtgtcttaattcgccaaggcggtcaagatcaacacggagaagtattctggggcacgagcattgcgatcccatctcccaaatgcacgttgaacaccgcggctttcggggcgctttttcatgttctcagcgagacaaacagacagaagcagaaacggattcacattgctggagacaatgccctgctgataagggcgctggccgccagaacgcccccgaagtccacgcggctacgaatatggtttaacaagtgccggcagctagcagacaaagtcagggtagcgtcatggaccctgctgcccagaaccgccaacgcaagctcccgcagcttagcacagttggcgaccgaaacagaacaaacgagcatcttacacagtgaggctttcagtgcaaacttccatcgaatagcgcagctggtacgacgggactacgcggagtgggctatggaagtttacagcaccgaagagtaagctgtcgactagagagagggacagccgaaggtaaaacatcggctatagggttgttaggattcagactaaggtcagttatccaatatacctcatcatcatcatcattatcaatgtatcattagcgaagttaatcgtatttaatacatgtatgatgaatttcagcgtccccaataactgcatgtactaccggtagttcaatgcgttcacactttattattttggtaaaaaaaaaaacgtttaggtcttacatcatgccgcaaaccattcctttaccatgaagcttacaactgggcattgtgatagctgttgaatacctagcggcggatgaagttgttctcatcgcgaagccgcttattcttcaccttcttcttgtacccgtcgcttggcgggttaatcttcttcttgagcgcctcggtcaacttcgtccacttcttgccgaacgccgacttgagggttttcaatccaggaagataatacgcttgttcttcgttgtcgatgctgctcagaacgcggttcgaatcagcagctgcgttcttaataattacggagtcttcggcagtcgcaaggctggtggaggttgccaccagggtgaccactgccacaagtaggaaggaactcaggtgcatgcttggtgagtcttggcaggggttcttgagtctagccagccaaatctgaagtgacggatttgtagcaaagtgctggttgtagactgcgactcgttgcaccggatacactgtagttgtcaggagtcctgggcgagatgggatcgccatttctatctgcgagtgaacccatcttcacatcccacttggtctacacaagaggaacaagacggggacacggctccccaacaatacgatatttgcttgcactttgacatagaatgatggggtaggaggctttaaggtatttacgtgttattaatactgtacctttcgaaaagtgcatcggcatgccatcatatacaatagttcagcataccaaacaagcgttacatgtacaggctctcccattgcgcgtttgcgttcgttgtaacttacaacttgtaagaaagcaaatcacattctccagattttgcaggacatcgatctggctcacgagcataagcgcaggacggaatgtcctgtattttccaaatcgaaacatcccggcgtcaaatcctacacaaaatctagtacttaagtattattggcacaagcttggcaaagtcaatctttagtgcttttgcaggacaacatgtcctgcaagatttgctgcattgcggatgccgcacccgcaatgcagcaaacttccgagctaatgcgccaagcagaatataacacacacgtggtgtccgttagcgtagcgtgcccaccaggaagatacagtattcatggctcgctctgtagaccaaggagcattttagtcgtaccagttaaagaaatctaagctcagccatgcatttcatacattctcaacactttttttttaactaagtcagcagtaacgccgagtcggaccagtacgtatatgaacgctgaaagatgtacaagcaatagctctccattacccattgctaatcgcaacatttaattgcgggggcacacgctgtgtcgacgcttgccatgactgttgtatgtgtagtgtccctggatagcgaagagcaattgcagcaccttcccttagggtctgacccgctgaagccgcccacgtttgagcctccgccgaacgcccataccagagctgctgtaccagctagttgtcgtgatcgtgatcgtcctcaacgaagtcgcctacgacgctaccgtagcgagccctcagtcttgatggttgctggtctgcgcgcgtcatctcctgcccgtcgagatccaggccggcatgccacccgagaccgaatcacctgtactcaaagccctcggccactttgtttcctgatacgagtaggacggagtcatcggcgtgggtggtgagaatagaattagacttttgttgagcgccatatcgctgacgatgtccttgtcgaagaagaactggtcgtattagcgtgcttcaacgccgactcggcaataaattacaaccacctacgccggcccagtctcggccagcttttcttgatgatgacgaggtaaatttatactattgtgcaggtggggcagcctatggcatgtttgctgttgcggtgaggccaaacacaggcaaaactgcgatgctatgttaatttaattctgattggacaaaatactacaattttgtgtgtcctggtaatgtcctgtaaaatccgttcaagaatcattttggctacggggcgtgtgacaaattgccagatggcacttgacaggttcgctgtcaaggggttatcaagatttgcatttatacttgtaattccacgttttcaggggataaaagctcccattttaagagccgccgctcatgtattacatgtactgcgtttgtgctggtttatttcagtcagctctctgccttgccaaaatgtttcattatcaccaacgcgtagctcattcgagttgattcaacttataacttgtatttcaactttccgattagtttttaaactcattccaaaattaatgaatgagtagaatttgagagtggaaagtacggctgtcgagattattagctacaacaaaaatcaagaagaagaagaacaattttttacattttcactttacaatttatatcactacaattttacttttccagatggagcatgttagccactttatccgctaaaccccggcttggaactgaagggtgccacgagaaggcttcagtgaacgccgtcatatttcgtatcggaggtgcattccgcattttcgcatacagctctggggagttgtggacgcgaacgacaaactcggcgcattcttccagtttgccaaagcgcccacagtcgatgtagctgtcaggattaaatagctccgaagcagtagtcgagttgcccaggtaaatggggatactacccgccagcaaaggattcgcgagcttttccgtcacgtacccgggctcagccactacgatgctgaaacagacggatcaaagtcaagacctgccccagtggaatgatctcgcgcaatgggctcgatggcagaagatttttgactcggatctcgatgagatgccttcgagctctctgctatctgctgaaggtggcggctttcttcttgttattggagtcaaaacggcagtgctggagggcttcgaccgtcgccaagctattcgcgagacgtggtcgagtaaacctgaacttccacgtgatgtaaaagtgtattttgtcgggtgtgcgtcgaactttgatgccatttcaagtgatgagaagcgaaatcaggtccagagtgcgatcaactatgaaaagcaagtgtatcgagatctacttacggatgagcttctgtgcgaagactggaacggaaaccaagtgaacaaagtgaaggcctttctggacttcgccgcgcagacataccggcatacaccgttcgtagtgatagcagatgacactatttacctacgagctgaccgactagccaacgacttgcgaatggaaaatcggacgcagcgactgtacctaggacaagtgctggataatcgcagtcaacctggcgtgtttccgtcggaacatcgctacattccctcgaagcgctactcgctccacaactatccgtcattcgcgtccagctcacactacgtactgtcgatgggatgcgcgcgctttattgcaaagaatagtgcgcggttgcaaggcttggatggacaggatggcgtcagcgtcgcactttggcttctcactattcaggttcacgtggagcacacgaaggcgttttcagacctccaagatgaagattgcgacaatgggtttctgtcgcttgctggcttatcttcatcgggcattcagaagattcacgcgaatgttgttgagcgacgtccattctgctacggtctcaaccgagatttatttctgaatattggcgccaatgctgaccgatcgagtcaactagcggtgaatttgctggaaattgagtcatttgttcacgacctcaatgcgtccgagtacctgttcgtcacaagcctcatctcgacgcgtgataacgctggcgtcaaggtttcgtattacccctcggcggagacgtttgcctcgtactcccggcgagcatgtgatgagacgcgtcgattcttactcgatacagaaatcaaagcgtggatgtgccctgccatcgcccagaaactccgggcccgagtccagcaagagttcgagattgccaagacctcactgacgatcaaccccgcgtttctcgagttgtggcggcacaatttgttcgttgcaagtgcggacaaccccttcattatcgggtacacgccagaatcctcgtacgcgtcgattgttttcgagtgcatattcaagaccatactcgagcatcacggccggccaattctagtagtctccgagaaggctctgcacgtgaactataagaaccatccggacgtatttatcttctccatattcgatgcagactgtgacccaatgtcgaaccctggatgcccagaaatgatcgcgcactatatggatcagtacttgctcccggtggattcttcctcgaagttgatgatgatatctggtgaagccatcgacacccaagctttggatgatcgagtccctttgctatcctcagtctccagtgttacacgaacgcagcacgtgtacttacccgtggttagtatttcgttcgcagagagactgcagcatattcccctggatctactgaccccagcaccacccgatcccatcagccgccggttctgtgcgtacttgtacgcgcgctgtgagaggccgcaccgggagcgcatgtttgatctattgaacgctttggaaccggtcgatgcgctggggatatgcgcagggtcgtcaagaccgccggataaagcgtataaagcatctcgctacttcaaatggttcaacgatgaggccatcgcctcgtaccagcgctacaagttcctccttgaatgtttgtcgcttacaatcgtcagtgtcagctctggcgtttcaaggtaccgaaaagtgccttctccatccgtaatgtaagctcgcgctcggtatttcccttccctggcagatcatcaaacacagcaacaaggtcagtcaatggactgcactccttccacttggcgttgagctccagacacaggaacttgtctccatactgctagtgaaagttactgacgcttgtcacgtcgatttcaacgcgaaaactgagcggaagcctttcctccgtttcctgaatttcgacaactccatcgggattgaggtcgacttcccgtttctgatcaccgatagcacctaggtggtgagactgcagtagcacgccaactccattgcagccagcacgcgatgaggactcgacacgttttatagcacgcggcgagcggttcgggaagatgcccaacccgaggttggagtccaccgacgcgtaggacatttggtccagcaccatcccggcgctctgtaaggtgatgaatttgtccgcaaatgactttaatgtggaatcttcttccttcaattgttgcaaaattccttcggacaaaccccacgccgtgatgcggatctcagtggggagactgaggtaccgacgagcaaactcgaagctcaagacgcccacagctgacgtccaggaagtggaacgcggtcttgggactcttggcttcgttctgccggagcttgtgaagggtctcgccgtgcgcaacctccagcgagtccgcggcccaacgggcggtcaatgacgcgaagctggagcttacgacttggcgagcgcagaccacttggcgttcgtgagggttttctcaatggagaacggaaggggtcggtgatgtcggtgctaagcttggttgggtttaagttgcaaagcgagctggagacgaagatgcgctgagaatttgtggtgtaaggttgatgagcttgcttaaaagcttctaggggtggtaatcgaactcccgtcgcgacgaaagagcgcttgggtgaaatcctggcgctacggagcgtaacggatatctattctgcaccaagaggacatagtgaaggcgctgggcaaagtcaccataatttcggacgagtattttcagctgtgcttgaatcctcatggccccagataatcgtgagaacattgtcaagttgctttacaccaataaaccaacaaactacctggtttcgtgacgtgcctgtccagctcaatgttccaagagccagctccaacatcgaaattcacagccgccgtattggtgccggattattatcgcaactgaccgcaaatacatcaacattttccaaactgaccctaaaggctggcgactgcctctggtttttgagctcgggagatccccttcctctctgtcggtgtaagtacgagattggcaacacccatccatgacactacatgaatgcactgcaccaagcaacaccacaaaatcgggagcacaatattttttttctattccttcccactcgaggtttatccacatagattctactcgacctttgtgcttttcgcatgcagaaagtgacaccgattcgcaccactgccgcgcgtgcggcgagatcatctgccgcggctgctccgtctacaagagcgtggattggcagtccgtggggctcactacgctgcgcgtgtgcaaggcctgcatggacagcacgtcggcctctgtggcggacaaggagaaggaggaggccaacctcaaggccgcggcggcggtggctgctgcggccaacggagtcaaaccggacggcgtggcgctgcctgagggcgtggacaacagcgtcctcagagatgcagtggaggagtacgcgctggcgctgcccggcgcccaagtgtcgactgtgcccgacctcgtgggcatcgcctggttgcagcagctcgcagcgagagatcaggagagcaaggatatggtcaacgctctaatggagcggctacacatcgacgcccagtagaaggacacgagcacgatggaggagcaggtggacatctacgacacactgtgcgacctggccgcgcagacgctgacctgcaagtacgccgttgtaagtctggtggacgagaaccgccagtggttcaagagcgccgtcaatgtcaaggagtcggaggtgccgcgcgacttcagcttctgcgagtacccggtgcgcgaccagcggccgctcgtggtcatggacacgctgcgcgatccgcgcttcaggacaaacccgttcgtcaccggcccgctcggtgtgcgcttcttggccggcgcgccgctcttcacggtggacaacgagtgcgtcggagccgtgtgcgtgctggacacggcgccacgcgagtcgctgcaggagtcgtggaggtgcacgtgccagtggccatatcccagaggtgccgtcgcaaggcaactagttaatgccgtgtttgagcttcagtgcctgcaatctgagccaattatcgtggtcgcctgcatccttcagagctttttcgatttttgcgatatgcttcttagccttggctggattgaacttcgcgaacaactccttcatggaaaaccctctctcttcgtcgatgtcgtcttcgtccttctcgacacgacgaagcatccgtccgccattcgcgtcgattaagtcggtggcagcaggcgactcttggtaacagcgctgcgatccatgggcgaagagagcgaggcagcactggcatgaaacgtggccgcaatgatcagcgcgtaaatgagagtggggcgcattgtaggtccttgggcactagtttataggcgagtgcgcttgtagcttgtgggatgccgagaaaatgacggaatgaagtgcagagtgaactgcgcctccacagagcgctcgctgttgcaacgatgagcagcactagaactacagacaacgacttacaaagccggcatgcttaatgccgataaattccctcccgtcaaatctgtaaaactgtcataaaacacacggcgtgttgcataaagtacacaagaaagcatataaagtacacaaaaccggatggtatacaaagatgaagtcatttgattgaatctgattggctggtttgcttatgttaagctttgcttgacttcgtctgccggctttttgtgtctgccggctttgtaagtcgttgtctgtacaacaagagaacgagacgcctgatgtaaacgggtataagaggtatttttttttgaagatgcaactgaatgtgtttggcattaattttaataatgtatagagcattgggtactagagtgatataatttactttaccactttatccttttgcaatccacagcggtttgatgccaaagttaccacttctgtgtcaacgtcacaatagcccctaccccttactaaagtaaatttaatgagagagccgttactgagctgtttgctgcttgtcattttcaaggggtaggctcaaaacggaatattccagcgtggagctactacaacaactcatggctagtactaagtagttttttttaattagggcctaggtgcaatccttggtagggtagcaatgtgatttccacaccatccacttcttgttagcctctcaagttctataaaaacattataaaaataccaagaatgtgatcaaaaattatgtcgcgatggagtatgcgtgtaactgtaacttgatactactgtacatgtacgtcaatttaaaaaaaatcacgaaggagccgcgtattagtgatcgtcgagcgtagattctgttagtgacggtgtcacgttgattacgcagtaccgtggtatcatcgagataggcacctttgctgtcgcacaggaaccaccgacgtcgacgagcgccactgtaccaacagtgtcagatattttcgtacgtagtggtcgccgacgccggttttagattctgttggttacagtgccacgttgattacgcacaaagcacatgcaataactattatagaggatgctgtggtctggcgcgatccagaccactccatccgtagtctttcgcatcgcatcattgcattattcttcgatagtgtagcgcctaggcaattgtaaattacaatgccgcccgataaagcggcatgacagctctgtgatatacagacgtttcataccgcatggtacagatctccgcggtggagaagctgctaagatgcattagcgtgtagcgaggcatagctatatttattatggtttgaagaaacctataaatcgcttgctattgttccagttccgtagcatcgggagcaactaagatcggcatgaaacagagaagaaccactagccagtaaagtggagataacatgcaattgtgaagagactttgatccgtttgtttcagcatcgcggcgttgtattcctcgaatttttcgtcgcttacttaagtacaatcgtttcatggtaccctctccatccgtgataacagcccgggctccgtatatacatttctctacaggcagatcctcaaacacagcagcaggacgaggcaagggactgcaactcttccacttggcgttcagctccacacaagctaaacctggttgttggggtaaagaccgctgtattgaccaactttgcgcagcgccaagccatacgcgatacatgggctagcaagaccgatttaccttctaatgggaaggtgtttttcctcgggtgtactccggtgtatgtcggctaatggcattcaccggcacttgccagtctgcgcgttcgatcctgccaaaacgattttctgtcctatcataggacagaaaaaaatgcggcgataaatctgcataggactcctatgcagatttatcgccgctcgatattcgctccgcctacgagaatctacaggagaccattgatgtagccaagtctatgaacgtagccaactctttgaatgtagccaagtctaccccatctgattccatctgataaaagtatctttattatcgaattggcggagggtcatgcgtgtcatagcaagcttgccgtgctacctgtgcgctcttcatgctgtcgctagggccggttccggttcgattgcgagccatgccgctgcgcctctatcgccaggcgacagtaccgagcttcgggacgatccgatcaccagttttcgactcatgtatccagcggttggagcagtggagacgaaccccgttgagttccgagcagagatcggcatcaagtccatcgaggagtacaaaacccactatggagaccgagtgatgtgtgtcgagctcagtgggcagtccaagagcaagaagtgcactccgatgttgaaccccagtatcatctttgacgggctggacgttgggaactacacggcgcgagcattcatcgcggaagacgaggatggcgttcattggtaccatcagacgccagagacaggattttcggttgtgagcaaggatgaactagcagcacacaaggccgcgacgcaggaagtactggggagggatgcgaagttgccgagtttattggagtgggcgagacagcagcgacaacgttgggaggaacgtgcagttggagggaatggcgagactgcagggcgtcatattgtggatacttcggtgagcaatggtagcgatgttttcttgttgattggagtgaagacggctgtggtggagaactttgcgttccgacaagcgattcgagagacttgggcgagtgaaaatgcgctgccaggcgacgccaaagtgttgtttatcgggtgcaacccaaaatttgacgaagttccaagtgaagttgagcgagaagagattaaaactgcgataaatctggagaagcgaacgtacggcgacctgcttacggaggagttgacctgcgaagactcgtacgacgatctcgcggacaaggtgaagcagttcctacgcttcagtgctctagattttccgctgacgccgttcgtgatgattgcggacgatgatatttacctccgagtggaccgacttgccggtgatttacgcaaggaagaccactctcagcacctatacatcgggcaagtgtgggataaacttctcggccgcagtcaagagcctgtgcgcggttcaaccgagcgatatttcatccctgaagatatctacccgttgcactcttatcctccatttgcattcggtccacactacgtgctttccatggcctgcgtgcgctttatcgccaagaaccacgagagattgcgcggcttggaccccattgacgatgttagtgtggcgttatggttgctcacgctgcaagttcatgctgagcacacgccggcattttcaagtcttgggatcggagtgtgtatgggcggcctcatttcccttgcgaacctgtcaccgtacggaatccgatcaatccacgcgaacataattgcaaggcgtgatctgtgtgacgggtttgatcgcataacatggcagaaaggtggagggagccttcacgaaactatggagacctccacttgggacatccagatcgaagtgaacgatctttatacgtccaagtttcttgaagtcacgagcaccatctcattgcctggtaaaacgagtatcagcgtcggttattttccatcagctgaatctctcgccatgtatacacgaagtgtatgctcgcggatccgcgcacatacaccggagacggactcgcaaccattgatatgcccttctctcgatgacttacaagcacaacttcagcaaaagttccgacgtcttgaggcatcgcgggcgattaatcgcgcgtttatggagttgtggaggtacagtctcttcgattccgacccagagctgccaccattcattatcgcctactccgacaatgctgtgttctcatctattgtgctcgagtgtctattcgtcattattcacgagccccagaagcgccccattttagtcatgcccgagtcgactttgcacgaatattacggaggtacgccggacgtctacgttttctccatcctcgatggcgactgtgaccctgtggctagaccagcgtgccaggaggggatcgcacagcattttcgtaactacggacaaggaccaaagcctgcgacgattatgatggttgcaggagagcccatcagcacccaaggcctcgatgaacgcgtgattttactgtctacagtatcagtggtggaccatgagcgccatgtctacttcagtgttgcaagcaactcgtttgccgagcgtttggatcactcacccacagcgttactctcgccttcaccagcctacatggagcaggaagcggtggatagtcgacggttttgtgcttatctgtacgcgcgctgcgatcgtccccagcgggaatacatgttcgacgtcttgaacgcgatggagcctgtggatgctctggggatctgcgctgggtcttcgcgattgcctgatgcctcgtacggtgcgtctcgctactcagactggtacaacgatgacgctgtcaccacgtttcagcgctacaaattcgttattgcgttcgagaattcgggcgttcctggatatgtgacggagaaactcgtcaacccgtttcttgcgggcagtatcccgatctatctaggcaactcgacgactgtctcggagctatttaaccccaacagctttatcgactgtggccgctttgagaggcttcgtgactgcgctgattacgtcgtgaaagttcacagatcgccggagctgtacgatcaaatgcaacgtgaacctccgattcgagatgtagaggcattcaatgaggcgttttcgtggcatccgtcggttccaagtcgcgatttggccgacaaagtagcgaagttgatgcaaataacgtaatgatgatacgaattctcttcgaagtaaaaggtgttggaattatcttaaacgagtttgaaccagtttgaagttcaaactttgaaccctccgcagcccctctgtagttacaacttcgagcgcataatgggggaggcaatgccgcacctcggccacttgacctcttggcgcttgcagcagcgcttaagggtgataggagagcaatgaaggcgacgagctgcttcagatatcttgagatgataaaattgctgcatgtcttccgggcgaaagtcgtatttcaagcctcccaaacggtcctccgggcgaactttgaagttctcggcaacgttgagtgtcgtagccgcgcatcttggtagagtgaacggagggcttgacctggatagggcgaatcggagaatgaagtcctttactcgcagcaaacagatcgatccttgttgtatgtagtaccttgaaactcatagaagatggggatgtttaagcaaattgatgatactgtggactcacaaattatcacgcacgaccacttatcctacagtgcaagagtctacagtatctatcaggcagccttgataccgtcgttcccagtgacgatggctttcagagcagtagcgagctgatccgatgcggtggccgcgttgtcgcagtctccaatacggtgcagcccaacaaccacattgtctccacgagaaatcacgggcgatccggagcttccttcctccgtgtcggcggagtacgcgaggagatgctcataggtgacaccttccactgcaactgagtagtcgaggttgaggatggtcgcggctttcgtatcggcgtcgttgtcggtcttcgcgatcttcttggcgccgcccttggggtgttgcgggatgtaaatgtgttcgtctttggtaggagcagtgctgcgaacctgtagaaacccgtaagtactcacataggacgcagcgtcgctcgtgatctgcaacacggagtagtcgagcgtcttgtccgacttgatgaacttgatgttggccttaccaaccagagtcttgccgacggggcaggtcgcaaaggtgccgtcgtcactacatccagcagtctgcacgtcgaactcgaacttggccgcgtccaccatctcctgactcgagaagcagtggttgttcgagatgatgtggccttggttgccccagagccacgcagtgcacgtgacgatggccttatcttcccgagtgcgctgagtccgcatcaccgccctcgatttgacgaccatggccttgtcctcggcactgcccgacgaaaaacacaccacgttcttcatcgtatccaccgccccgcagatttcccgctcttcattctccgcctgcgtgtcatcggggtacgagtacccgactgagtccaacttcatcgtcgaagtgctgctggttgggcatccttttgagggaggtacgtactgtatcaccacacccgtgccggaaatgggtgtagtggtaacatccgatgagagcgacctgaccgtaatggccttcgacccgttcactgaagcgacgaccaggtgagcaccggtagtcagattgactgaggagaagtggagccacaccgcgcttgccgtgtcctgcgtgatggtccactgctggtgctcgcacggagatctgattgtgtagctcgaggtgttgacttgtttccaggccccagttgcgaagccaccgtctgatgatgaactagccgcctctacacagtacgtgtattgtgaagcagcgaacgcagcagcagcgaggaaagcgactcgtgtgagcattgtgtgcccgacaaagttggttttgcggcagccgatggaacgtgaaatgaaccaaattggagcccgactcgcctcgcccatttgtaagagccacctgcccatacagccgtcgacgaattccacgctcaggcgaagtgttcgctgcgccgacagcgataaactcctgttttgctggtcgccacttcaaaaacctctataattggaagattagtcatgttgttcgaatgtatcccctttattctcatacttagaccatcttataaatatatatgttgtcctgttgtgctggaatgactgctacaaaacagcctgacaagttgtttttcgcgaaagaccacttgcagctggtgggcagctctatggctgacagacttggcttctactgcttccacttgggtgcctttgcatgaatccagctgcaggtttgcacaccaaaatataatcgcgaggggaaacaagttgtggctcgagttgaacgcgtcgttgatttgattgatgatagcagagctgccttcacgctccatgagctggacgtgtcagttaatgcgccgctgcatgaactgtagctcattaagctcgaccttgagccaagaggcctgttttctcaaagtcaacctcggaaccagctcacagcgtcagcaccagcagcgaatggcagaagaagaacacgatacagcaaacaccgagaagaatcgcgatcttgtaatctgcagggcatttgatcaatacgatgtgtgagaacaacagccttttcagcacccgcttcattgcatttgtgaacgcacccagcaactcgtcgacgccggcgttgccagtctgccagctaacctgaagctccgccgagatggcgaccaaaaaggcgacaatgcccgacagaaggcacagcaagccgttccagaagaagcggttcgtcacggagctgtgtgctgcaaatagccacgtgaccacagtgctcgccaccaacgcagcaattgtcgccagaccatcagacgagtcgaagctgagagacgcgagatcctgttaaaaggcaacaacagcgttaagtgagcacccttgcagcaccagtcgcgtacagatgcgttcattgcagggagaaaacttacgctgaagcctgtcaacgggccgtccaggagcatcgcggtctttgcatgaataaatagcaaaagaataaatagcagcgttgtagccatccagaggttcagcccgaggccgaccgtagcgccgaccacactcttcacgccgcccacgacaatctcaaatcctgacttgacgatgccaccttccagagggacttcatgacgtagcaggctcttgtcggcgccaccgctcaccaggtgaaagacgggggcctgcttatccgccggcggcgcaaagctcatgcccgtgatagcaaacgtgtgctgctccgtcgacgtcttcttgtactgctgcagcgtggacgtcaggaacaccttgatctctcccgtcacagcagccgtgcagacgaagcggtcgtcctggctcacacagagactcgccacgggtttgtccccagcaatggttgtttcctccaccacccagttccactgatcctcgttctcctgtgcgatggtctcaggcttccacttaatcagaatcgagtcgccgcgcgccggggtcagcaccgtgtacagtctcctgccactgttggagaagcgcacgcagcggaacaggtgcttcctggggcccacgacgggcttcgtgggcagtcgctggatggcgatgtccagcgcgtcgtccttggagaacttgcagataggcgtcacctccgtgagtctccacagatgacacgactggtcttcggagctggaggccaccaagttgcggtgcgacaggtccacgtcaatgtcccggatcctcttggtgtggcccctgtactccctcgtgagcgtgaccatgttgaccccattgatgacgcagtccccgagcttgggctgctcctccgtcaccaccttctgatgcgggtccctctcgtcgggcaccttcagcgccttggccgtgcccgccttcttctcgggcttggacgggtcgcggctcaggcgccagacgcgcaccacgccgtcctcgccgcccgtgaggatcgtcgagttgcccacgaagcgcgcgcacgtctgcgagctctcgtcctcgtggaagtccgtgcggaacttgaccagcagcgccatgctcttggccttgaggtccagcgcgtagacccagcagccggcgctcacggacacggcgatgagctggccgtcgtgcgagaaggccacgcccgaggccagctccaggcccgtatcggccgtgatctccttcctgaagcccgtcgggtccgcgtccgagagttggtagatgtcctggagaggtacataggtagaataaaacaaatattataacttagagagagattatcactgactggaggattgaagggggactgagacacgtacgacggtgttcttgatgccggacttgagcgagccgccgccaccgcagatcgcgaagaacccgcgggcgtacgagagccccatgatcgggtacttgaccttcatcttcgctgctagtgtgacgggaagggtgctctgctttaagctcgggtgtcctcggtgagctttttttttggcttctgccacgcggcatcttttttcgtcactgaagagaggtaaagtagtgacaaggcctactgatttagagataatcggcttgtagatgctgagctttgacccctattggggtagtcaacgctgcataccttagtagaaacactctcagcgttacagtacacgtagcaacaactcttcaacacaatcggataatgatcttgtattcgtttcgtgcaagtaaagtatagcgcagtatttagttaacggtgtgccttccgaaagaacttcgtcacagccgccacagttgaccagcgggacttggccttcttgagcgccttcaacctcaccgcgcgatccgccaacctcttcgcctcgtcctcagcctttcgtttggcaattaagtggtatcgataggtcatgtatttcttgtgttcgtcggtcatcgttaacttgagcacagccttctgtccttcgttgatggctttctccattggttctgtaatccccagacgtttagcgtagtcgacttcgttcactccttccagcatcaatttctgcatttcggctatagtcagggccggttcaaaggccctttcttcggagacgcctgcagtggcgcggtgggatctcagaagccgcggggttggaccgtttgccacagccactttcgagagcgttgcttggtggtccgctgtggtcgtgagcgcctcactggtaagcaggcaggtagccacgaccaccaccaagagctgggagacgcgcattgacgttcgatggggcggtgggctttagaggctggtgagtgaaaatcctgaagtgcgtcttacattcgttgaggagaaccattcgatgcaggaagctacgagggcgtcatcaagtcgcatcccatgcatttccttgtgccattgtggaggtgcgacgcactcgtacacaagatacagtaagagagcgtcacaggattgctgggtatacatttcacaatatgaaaacaaacatgcagcacattcggaaaacatgttgtttcaaggaagcttgaaaacggaaaatgtaacttttataggctcctcgaacgcttttgaagtatacatttcacctcaagatttgtgaaaaaccacatggtcgaggtagattacgccattgtgtatgccccagcaggatggcgaacacagtggatttgtccagcaaattgctggcagcaacaccatgttgacaacaaggtctgcaccagatattaattaacggggaccaacttgctggtttataccaggagaaaacctcatatctaaaacaaccaaccgcaattataaaccaaacacatgagatttgaactgtagcgattgggttgcaatagggtgcctgctgtttgcccatagcatacgtaacgctgcagcgccttacagtgcgcgccaaaatgataggaccgccttgaaaagttctcataactcggtcaatattgattattttaaggtgcggtttcgaggctagttataaaacacgctgggaaagatcaggtatgcgctaacactcgcgtttttgcactctatgcgatagctcacatacaaaaaactgtttctgccaagtcgacacaaattaggaccacccccatcccaatacaaaagcctatatagaggaaaagcctgtacaaagcgatatgactggggatttgtatcgcgacaacttccaccggcctctggaacgcaccccttcatgcaaaagccaacaccaaggggatatccgataagctgtttaataaatacgtcttagttcaagcgaaagcgcggggcttagacgtagttttaaatggacgagccgctatctagagagtcactcacacaccggtccttatatagcaaatcatagggattctgcagacgtactgcagagactgacatccatgcttagttctcgctcgatatggctaaagcagcggagccatggccacacattgtagctaacactgcatactacgtaaggatagtcataggattggctcgcgccatctctgtgtgaacgcactggccggtggaagttgtcgcgatacaaatccccagtcatatcgctttgtacaggcttttctttatataggcttttgtattgggatgggggtggtcctaatttgtgtcgacttggcagaaacagttttttgtatgtgagctatcgcatagagtgcaaaaacgcgagtgttagcgcatacctgatctttcccagcgtgatttgtaactagcctcgaaaccgcaccttaaaataatcaatattgaccgagttatgagaacttttcaaggcggtcctatcattttggcgcgcactgtagccattccacacatgcatatggcaagcatcgtatgaacatcagcacatgttttgctcggtagcaatgcaatactgtacaggccaatttacctcgcgcactctgcggcgcacgttggctcgctgctctcgctggacgcgttcggcgtcaacgcgtgctccgtgtcgcccgttggctcgaacattttgctgaacgcgttcggggggggggtctaaggagggccattcccaagcaaggccattttcaaaaaaaatgggcatgttttcatgttgaaggggggggggaaggacactcgcgcgctggctctcatcttcggacttcgacacggggggggcgcccgtctctcgcttcgctcggggggcaccgctacgcgggaaaacgtcaaaaggtgtatgaatttgaaacgttttgtcaaaaagcgattaacatgtgtcaataggtgtatgttggggttatcagtatcgacagtaagtgtatgaaaggtaacacgtgtcacaacgtgtatgaaagctcacacgccaaagtcacaacatgtatgccaaagcaaatgaatcgctaggactccgatgaaaacgggttcaggctcaaacccggcaaaacccggagttctgtgggcttctgcatgtcttactgagtccgattcacggcttttaagccgtcattagcggatattccgactgagggacagcaatgagtgtcgacgcagatgacatcagcgacgacggcgaatcaagtgatgtcgagactctaagcatcgggatgacattcgaatcgggcacagatgcgctacatgccgttcaagactatgcgcttgctcacgggaaggcggtcaaggtcaagcaacgcagcggaatgcatcggttgattggctgtactgcggaaggctgtacgttttgggttaaagtctaccggaagcggcgggctgataagacgtacgggccgtggtacatatcgtccatgaacacgaagcatgtaaactgtgtgtccagcgccaacccaaccaggcgccagattgccgagctcccaactttcgaaagcgcggttagagctgactacaccatctcagcaccagcgttggcagagcaggttcagcacagagacggcatttctcttcagaaaaaacgaagaactctctaccgagcccccgaagctgttcatgaacttaagtcgaaggatcttgctcgatcgtacgagaaaatacccagctacctggggcaatttgctgcactgaatcccggaagcgtcgccgtggccgaacgagaccagcaaggccatttcaagcgagcaatcattgttgtgaaggtattcgccgacgctgttttcgcacgccaaaccgttcttggcgtcgactgtagccactccaagtgcccagcatacggcggtatgcaaatgcacctggttggacgtgatgggaaccttcggaacttgacgattgcgtttggactggtggaggcagaagatgtggagaactatacgtggcttttctcgatgttgaagcagaatgggtacgacttcacgggggttcctatgttctgtgatcacagtagagctctaatatctgttgctctcaagatgggactcaatctcaagtactgcacccttcacatcatccggaatctactcgctcgttttcttaagttcacgcacgggcacaagaagctgatatgagccttgcaaagcgcggagacggaatacctctactcaagtcgcctggcgtggattggcctggagttgggcccagacgtcgaaacgtacctgtctgatattccaaccgttcgttggtgcgtccacgcaaacgttggagttgtgtcattgtacggatggcgaacgtcgaacttcgtggagggtgtgtttggctctcaattggtcaaaggaatgcgtcgtttgcacccttacggatttctgcaagcaatgtgtggtagcttcgccgacgaatgtttcaaccgctcccaaaacgctgattcctggggcgagaagaagcttgtgctgaccccttccgccgagaagctgcactgtaaagaaagctcgaagattgggcaatacgctgttcaacaagcctcacctgaagtgtactacgtgcacgctacggatgctgcagtacgtatccggcgccgggtgaacctgcaggatcgaacgtgcacgtgcgctcgcatggatcagatgggaatgccttgtcgacacctcatcgctgtgcttgaaagttctggtaagttgtcggaagttttttcttatttccagccatgctacaaggtttcaacataccaggatacatttaaggagcgcgcggtctttattcccattgagacggaagttacttgtgacgcggggtggctgccagctcgacacattaaaaaaccaggtcgccctagaaccaaatgcatccggagcagtggcgaagaaggcggcggaacctctcagcgctgctcgcagtgccaccaaagaggccataacaagcgctcgtgcaccgagcaactcgacgattagaaaattcaaagtaacgtccctcagtcgctattgaaccttaatgacgtcaggtttgctccttacatgatcgctgcatacattgccacattcctccactccgcaattttgaatgaagtccctcagtcgctattaaacctttatggaaccattcttgcttcctacacgatctatatgcaatttgctacatttataaactccgcaaattttgaatggagtccctcagccgctattaagccttaatcaagtgaagcttgcttgcttcataatctataagcaatttgctacaacctatcactccgcaaattttaaaagaaggctttctcgttaattagatcggaccttcattcatccaagaaatttgaacttatgcattcgttgactgtgtatcctgtccaactagtccgaagtcataccgctagcaaccgtgccatttccgtcttcgctgagctcctcgtcagacccaccacgacaatcttcggaaccacacaaacatgtaaaccagagctcatccccgtagtcaacagtaacttcggaccccgcaccaatgtattccatcgccaccaccacgaccgtaacgaagcgtcgattctggacttcatagaatttgcagtttgcttcgcacgaatggttcatgagccgtgcgatgttccctttgtcgcgggcctcgatccacaatttttgtctgcgagtcgaacgtgtctcgagcccaattgtatagtcgctgattcgctttttgtccttgctgtagtcgtgtgtggtgagaacgcctgcatactctgccactatagcaccctcaaagattttctcggtcgtaaaaacagaatatccaacatccccgctggccaatcgcagcccgtccagagtccgcagacgattgccgcagtatttgccgttcagacaattgtttcgggcgcagaaaatgctagttacagcattggggcatgtgtcgggccgacaaatgaactcgcaaccgcaccaatccatcgatcccaaatctgcaacagcaatcttgcatggattttgtgtgtgcgtgatctcctcaacttgctctggccagggaacagcatcagcttctgtatacaggcgcggtgtaaccgtatcaggacttggctcggtacttagcggtgattctgaattttcctctggctctgattccatatctccctcgtaggcatcgttgtcaccaaaatgatcctgcacctcgccatcatccgttttcttctttcccaccaccgcgctgagcggtccgtccaaggacaaccgtatgtctgcatcttctattttgtccactagactgtcgtcctcgttggggctattgtcgctgtcattactcgataaatcgatgcaaataacttctgggctgataggcgagcgtggagcttcatccgcgacgactctggtattttcgacgagcgcagcattcgatagatgcctctcttcagctccaaacaattcaccgctgcatgtctccgagtcgctagaactcaacaagcaaataacctctggtggtaaaagtggtgaaccactctggtcaacatgacccacaccaacgctgtttgtaagctcgtttcgtgtattcgtaccgatggtactagcactaagctccatttcttgcttgtcatcatcactggtcccgtccaaaacgatgacatgcagaaccggagatctagcacatgaggtagcaggatctggaccattacacctatctgctccgcgcgcttcactgtcctcttcttcattggtcaggtcgaccaaatctgccatgtcgcgaagtgcctcatccttatggcgagactccgccactgtcttgcccacccgcgatataaatggccctgagtagcatgcacccttggagaaggtcttgtacttgctcaaaggcgcgacttttatcacgccacaacggtacgctcgagccgagtcacgcacaggagctcgctgtcgcatgtggtgccttttgcgcgacttcgccttgaagtagcctgtcttagtagtgcgcgcggcgtgcgaacgacgctcgtgctgcgcgtacgtcggtggggctcgcttcccagacacccgagtcattgccgctcgtatctcagtcggatgatgtgggaatgagatgtgctgttagtccgaatggttcctaacgggtcgggtctcagtggtattaccccgggttttgacccggttgcactggctatcagctaagcaagtgtcagtacgtgtctgtcgttcaaacgtgaccaggcaagcgttgctggcactgtgaggcaccgcttctgacaaacgtttccccaacgcatacaccttttgacgttttcccccgctacgcggtgtctagaaaaaaatatcgggttgcagcgctcgctacgcccgcgcgcgcagaccagccccgcctagggctgtttcgtgcagtgctcgaaagtgcacgaaagtactttcgtgcagattcatcagacctttattacggagatagcccattcagacatcaattgcgtttctctactaagtacgattaaagctcttgaaattacaggcataaccctaccgaaactggtgcacgaaacagccctagccccgcctaacccttctagccccagaccttattctgtatcttacagaataagcattagacttgattaaagtatacttcaaaacctgtcaaagatttgctgttggaagtcctttcgcatcttgcaggtcaagcgctgggtacattgtgcacagaacagctacgaaagtgaacaaaacatgctcaatgtatccaccatatgccgaaatggcgagcttctattggtcgtggcgagtgtagagcacgctcaaaacctgctacctggtaataccttgcaaggctgctaaggcagcatacttcggctccagccacccatctccggcacgtcgcgataaacgcggaggaagaaatcgccctgttcctaactgacgtagtgaggaggaactgggcgaattcttcctcgtgcttgacattagcgcatcattagatttctttagcccacctaacaagcttgttacgtttgtctctctaacaacaccagggagcttgcatgctcaatagcccgtaatgacacgcactacacacggttcctcttgttcgaaacaggacaatatatgatattcatgccaacgtctacttcttcctttacatgcgcacgctcttcaatgttcgcgccagccgtgggtcatcttcgccattttggcagcctccgctttgctctgtagcctccggcactgccgcttcattcctgccgctttcatcggtagcctccctcgtagcctctgtcccttcttctgtaatctccggtgtaacctcatcacgcggagaccttcttctgtagcatccgtcgtagcatttaccgcttcttctgtagtctccggtgtagccacaccatgaggagcgcttcttctgtagcctcttgagtagccactgcatcagctacaatatagcggtagacccggctgtagccggcttcgtaggaaccgatgaggttgtgcgctgactccacaatcgatctgccaatcgggccacacgcgagagctcatagcgtcgtctgggtcggatcaccaggtctggtaatcaacatcgcaacgtagatttaatataccactagtacaatgttacagagcaaagtacacgctctcgcttacctgtagatcacaatggcgctcatcatgatcgtcttcggccatggtccttggccacttgggcgcgctcgacgagccccaacaaagcttgcattgcgacgtcttgaacagcgcagtttcggaatgaaggaaagtacgagtggctgacacgcggcggctttaggcttccacccgaactttcaaacatgttggtggtttatactcgtccgtctattaccggggaataaaccccgtttatcttcccatcgctaatcaaacaggaagatgtgcacaataccggctatacaaacatccatatgcgaagttcgaaagagaggacaagtttgctggatattatgtcctgtgacaatgcttattctgtaggatacagaatacggggttagaggggctaatcggcgggcgttggaacgagtgaatgcactgagtgaggcttgtgcttgcatccgctcaccctcgcccactcctcaacagatcatgatcaaatgcattgcctatgaaaatggccttgcttggaaatgaccctccttagactctccctgcgttgggtttcacggtgcgctctgcggcgctcgttggcgcgaaagtattcctgagcgcattggggcgatctgcgtggctaagatggctcgcaggctcaatactattcgcccattgcacctcggcgtcgatttctctgtctacgttgtagatccaatttaccacacgaatatatgggtgccgttggatggtctctcgtggcccccgcacgttcttctacagggatatcggagggtccggttgtgcttcgggtgcagctcgctcaccgcgcggatgctcttgcgctggatcgtctcaatgcatgctttacggaatgccttaatagacagcatcttcacacctgacggcgcaaagctgcactactagagtgtaaaatgcaaaatccgtcccgtaaaaaaaggctgtctgtactggaggtgctacgtctgtacaccgactcgggtgctatgtttgttcgcccacatgagtgcagcgtttgctcactatgcgaagtgcggcgtctatccacgcatgccttacacaggccgcatcagcccacgttttggaagcactgaaagaactgccgtgaaatatcggtgaaaccacgtctactatatatgtccagtgatacttacgctacgcggcgtaagtgcacctgaatgcactgcggtgagatatcggtggagccaaagctacaatatataataacaccagtgatacttacgctgcctgcgtaagtgcacatgcaaatcctaggttattagatccactcaatgatcacaacgtaaatatgtcgtgcagagtaaataccgaggaacttaaacaaacaatgaagctattttcgctcattggcgtaactacgcaaataaatacgtaactacgcttctacaaatagcactgagacttcggcatctgatggacttgtatgatagcgtgcccacggcattcgataagaccgccattgctgagccaagggttgacttgtagaagctcggcatactatcatgcgtgtccaccaagctgtgtgtttttttgcagagaggttcggcaacgattacgcgcgggcttatgcatcgaaacgataaaagtgccaacacgtgcgagctttgagacacatcagatagggctaggaacgtttcctcatcccctcagttcaatgttaataacatggtttcattttttagggcatcgtgttaggagtaagcactttggatcaagtttgcagctggtagtttaaagttagtattcttggtttagatctcatgtcctctcgtttaccagcctcacaaacttttattcgtcacgcaatgtactggttcgcgggcgttagaagcccgcttgatatcgcagttcggtgttttttgtagttgctgttgcagtaaaaagatatcgctaaacatgtaaattcattggttgccatcaatgcgaaggctttaataagaaggcttttggtccaatacatttttttattttactaacaaagggcatctcctgcggctgcttcgcagccgcagtatccgcctggtgtattgcgttaacagtaccgacgtagaatgcggagttggcaacaaattgtagaagatgaatcttgcttgagatgtttttgcagcttggaactcacagtgaaaaaatacctttgtagttattgtagtaaaaaaaacttcaaacactctctcgcagcactaacaagtatcctatccaggtatactatacttattaaagtacaaatgtatggccttgcttgcttgcctcgctttgctttgttctgctctgctttgctttgtttggctccgttttactgcttagctgaatttacttccagtaacgttgcacaatgacaaaacctggctgggttgtgcaacctggtatacacaacttgcacaacccagcttcctagccttgccttgccttgttttgctttgcttgcgtggtgcaaataagctgcagcttaatcccaacgcgcagatccataggcagctcgccaactactgtaccggccagcaaggaatatactacggattctatacaaacgtcaataacaggtacacgagtctactttacttagggttaattcttcattcaccgacgtcggagggtccgacaagccaaaatgagagtatgtcagagccgtgaacatgttttacttagggttaattaaaagagtttaggacggcatcgcagagggctgcatctggacatcgtttttttttctaaactactgtccgaaaataaacaatgtacatgtaaaacttgcacttccagaataaaaaaataccaagtcgaaatcggtctcccagccaaagcgcagcaaccttgtgaagtccggtactgtattgcagttaactccatttatttatccagcacaagtttacagtattggttacgtttgaaagccccgcgaactgaggtttgctcctgttccgcaaaaacttgttcatcacgagcaaatatattcaagaaattcatgcagcaacggcgatgaacgggttccgacggacgtagtagaggaggtatctgcgcagcacaacacgagataggttgtcagagctgttacatgtagcaaactcggcgagagggaacgtacgcttgggagcgctcgactttctcgaccggcacagttttcacgtcgatgtcgtcaaaaagaatccactgctgctgcttggagttgggatctcgagcgttgggaacttcgtctcgcacataggacgtgtaatgaccgccgttcaccgactccccgtggtgattcacaacggcgacgaggtcatagacgttttcgcttcggtcaccttctgtctttccaggtacggcgcctttgctgcctcctttcttgcgctcgctgacttcgtcgatgcccacggacgtaaatggtctcatgttaaggcctaccaggggaaactgaacgatctgcgtgagcttctgctgacggtagaagtcgagacgacgaatgtggaacaccagcacattgggcagtgtgtgcaaattcaggctcttgtagttggtctggtacttcgaacaccgcgggcagtacacttgattcaccccgcttagttcctcctcggcagcgaattgacgcaaaagtgactcgagagttattgcggacgaacccgagacctccttcttgacacctccttcttgctttccatccttgccactctcggtcttcccgctgtctagcgatagtgacacgtccaggaacggatcgaacttgtgtgaagctgagccacagcccccacacgccagttcagagcgtaatgcaccagagaaatgctggtgcacagcacagtcgcactcactgtgtccacgtggggtgaatcttggtgaggcaccgccgtgaacgaacacgcgagggtgcgtatgcgagtgcagtccacccagcagcgcaatcaacagctcatgtgcatcatgctgagccgtaccgatgaaagacgggaacgcactccacatcgcctccagtatcccttgtggtgcaatgggagacgcggtcagcgtgttacctggtaatcgagtagacggaggtagaagcagagccatgaacgcagcgagctcgcatccaagacacaccgtgatcgcaggatctgggccgcgcttggtgtcgttctgtctgtcgccatcttcgtcaccctcgtcgttttcaccctgctctttctgcttctccgctttgagttgctcgtgcttcttttgcaacattcgctgtctctgctgctggcagatggtcgtgtcatgactcctcgccacgaaaaagtagtgctgcagcatggggttgtgcgccaacgcctgcagcaccgagctcatgaagcacgtgttccccatgttcaccagtcctcgtcgcagcagcttgtgaggagtagcaacaccccgcagctggcgcttgcgtcgtcgactgccgccttctacggctgcatcagggtagataaagtcccgacagcacgcgcagtagagctgccgctttcgctccatcacagctgcagcaacaagaagaagtttagtattacctctcaatagtaatatcagcacctccgacgcaccaatgttgtggttgtggaggatggcatgtgccatgaagctgccgtcgtcttccccgtcctcaatctcctgcatctgctgcacacacacttctcttgatccccggaatttacatgtcagacagcgatacagctccctcgacagctcggcctctgtctcctacaaggaataattggaattaataaataacaataaattgtatttcaccacgggatccagacctgatccaccaggtaatgctgcaactgcgcgacgtccgcggcgtcctgcgccgctttccccgcctgcaacttcttccacgtcgacgcgtgctcctgtccgaagtgcacacacacggccccgctgcacagaagccgcccgcgcttctcccccggcctcgagtcgccctgcttcatcgtctgctgtgggatcgtcatgagcccgtgagcgtgcgctcggattggctacaatgacgtagtattttcacccaatagatgagcttaagtatgaaaacttcaacttgactgcgtcgcagtctgcgactcgcaagagatcgattccagcaaaatcggctagggggtcaggtggctatgcgcgatgaaaattacaatcgaagtcttcgcccgaagatgagtttagccgtttatgcattactgtactgcatcatgcaagaagatcactgattcattgcaatgtcgaattctggttcagcaagtgagatttcgcagctttatccactcgaaggtcggtccatgtgaggaataccggcatccctttgtcattacatacaaatttcgaccttctctgcagcctgtgacgatgtcaccgagtaccttaatgcttcctcctctttccgcctggcaggcgaggccgcccgattcagtccgcaactgagcgtaattggtagtaggcgaggagcgcctgtatgccataacaagtgctcaggtgaaaatgccattgattggctaatattagcctgtatgtcataacaagcagtatgtgatgacaaagggatgtcggtacatgaacagctcgaaaatgaacgagagtaactctgcaggcgtactgtaatagagcaactaaggaacagtaccggcagactgtaaatgtactgtaatgccggttgtcatcggtgctcgcgttatccgctgctgccgtaatctagcaggtatggccctgcttttgtttttcacaaattttcatgtctacttcatctgccctgaggacttcagcgataaaaagctattccagcggcaatgtccgctttcagttttcctaggagaagcacgtttctcttgatgatacgatgcgcgagcataacaatattatgtgtgacgacggcaaacaaaaaaatacttacgaacctaagtacgaatcgctatttagtggctgtcttgcgcacattttgagcccttctttgcatcgaaatgttgaaaattcgaggagttgtcggcacttgaaaaaaactatccccgttttgaacgatagtgacttcaattctttctcaaaatttgcttagcgtacattatcagaaagctctcgttaaaagcaatcgcattaaaggcttttacgctttctacgagtaattttcactttcaaattttcgatgtccggataggtacgaattatgattggtcaactataaagtcgattatctcgataactctcaatggcgcgttagtaacattttgttcgccgtagtctcaactgcacagtataatatactgtgcagtgcagtaccgggtacacgcaatgcctaccgtaggttttccaatccaagatagaactcgggatgctctgttcgtatcttgaacgaatgcatcgcagtgcgaattgcctcatgggatgtgcattcacggcggctttctggctgtgctcgatcgaatggttctcgcccggcaacgccaatggaagagcacttcagaatttactctccatgcgtctatatcaactcttggttgtgatcgcggcaacttgcctactttccagtgaggcgctcgcaacaactacggactccgaccagacttgagctctcgaaagagggcccaactcagcgatttctgaggtcccaccgcaccactgtcgaagatgaagatgattcggaagaaagagccctgagtttggaggaaatgaagaggatgatgaaggcgggaatgaacgaagaagcattcgccgaagagctcggcgttagcgaaaagatgaagttggtgtcgagccaacctaacaccggcttggccacgttcttgacgtcccccgaatacgcgaagattgcagcgtaccaaaactttttgatcggagctcggagggattatgcgaacggggtggcggagtcgtccaagaaggcgaagtccaagaagtggtggaagtaggcagaaagctaacaggtactaggtagcatgcgtgctaccttatctaagtccctttcaattgacaacggagaacgtacggaggtcatttctgctacggctttgtctccgtgactgaagataaaacttcgacagcaacaaaagttggattaccggagcctccattataaaacaacaaaagcaacgataaaggtcccacgtacatgtattccctattcaattattaataatactttacaactactacgtagtactgacgttacttttacatttgatagtattcgacacaccagaagtgagctgaagttggtttgatcttcggagtttggattcttattacggagctgaatatgctgtaaattgttgatatcgctgtttcaaggggctcaggctctccacatctctgcccattggcgatgaagggctgcgcatctcacaagagcacgatggtgccatgtaaaggttcaagtaagtggcagccagccgtattcaaaaatttgatggacccgattggacaagacgcggccactataaaaacaaggttctgaaatgagatttcatcgaacaaatgacagtgtaccaacttcgcaagcccgcaacaatatgtcatacccggggtttcctcccttcaacagggaatacacgcaggttggactaatagcgttgattcaggctgaccaagtctccattcgaacgacaagatggcacaccactattttaaactctatacaatcagcttttgaattaatgcgaaggcaattataagctgaactcgtcaagattgaaaccagggacgctacgaagagctcgaacggcatctcgtgaactgggtcgggagcttgggtcacgatcaagacaccattcggccaagtcgacgatttcatcggggcacgttgatgaaagtgacggcatcaaatggccggaaatcacgtgctgaagtacctgcaacggtggcatgcgctccccacgggctgtcactgcatcggcatacggagagctgtgcgtgtcaagctcagttattaggacgccaagggagtagatgtcggccttctctgagtgcgattccccggccaaaacttctggagccgtccaaaatggcgatgtccctccatttctctgggatgaattcgctgtgtctgcgctgtaccgatctggtgttgccaacttcgcgtccactgtagccgaaagcagtacattcttggctttgatatcgccgtgaatgatactatggtggtgaaggtagaccagacctcgagcgacgtccaataaaatctgcatcttctcgcgtttccacgaaagagagaagcacatgaagtcttcatatgcttccgcttgatccctattcggattcgactgacgcaaatattcacgcaggtcgcccagctccagatactccgtcaagagacacaaattctgcagcgagctccaggcaacgcccacgaaactcaggatacttgggtgttgcagcgccgcactgagtcgaattgatcgcacgaatgccttgacctcgttccaactcttccgttgctccttggacaagcgcttagctgcaacgcagcgatcgtgcaatacacacagccacacttcactgtgtccacccctggtgattaagtggtggaattgcagactgtcaaatggaatttgtgcgtgcttcaactgcggatcattggccagagctgtgagcacactcctgtccgtaagtttgtcgttgctggggctcccagacgcgaggctttcagcagtcaaggctaacgacaacgacagaggagacgattcccaggccgttggagaggacgacaacatctcgagaaagtcgtgcatcgattgagggttcccaaacacgtcctctcggtcgattaccggttcattgcgtggtttggcggagctgttcataatgttgtagctcctggtgctactcaagctgagctggtgcgccgctgaattctgcagatcgattttcttctgttctgagcggcgccggagataaatgacgacagcaatcgccgtcacgagcagagcagcggctccaacaatcagcacggggacggtttgatgccagtcgccaggtgtagcatcatcgtgctgcaatctggtcacgttggtatcatccgttgcactgttatcactgtcgtactggatgatcgcattcttgtcggagctggagccgtcggatgcagtctcttcagttgcgtattgttgcctagaaagcctatccacatactcgtccaaccacttcgtcatcaacgaagagttcttcggtcgacaccaccgatcatcagactcacgatactcgatacacggaattatcagcgacggcatcgcggtttcagctgaacacgtacgtgctgagtacgcctcgtctagatagttgatgcccgagtggattgcaaataaaatcgccgaacgacctgccgagatgtcgctccatgtatgacgacgcaccagtggctcgggtacctccacgctgcttgcattagccaattgaagcccagcagcccacacaggagccgcatttgccttcgacttcaccgatgagcacgcacattgcacgatatcatcaagctgacttggcccacaatcggctgagaagctccaagctatcgttgtactgtcatttgtcgagcagcttccaacgtcgcagcctgctgcttggacctgctgggtctccagtgtaagaccatccatggcagctccgaagccgccggtctcacaacgcgtgtaaacttctgcgagagctccgccgtcgccaaacgcatatcctgcatcccatagcagtgcacgctggagaagacccggaacagaaccaaagctcaatccaaaacgctgaagattcgcaattatcttgtctggtacatcgtgttcgagctgaatctgtggtgtgtttgcgtcattctgcgcactgttatcgctgtaaatctggtaatacgcacgcacaaagtcggttgaggtgttgaccagcacgatactcgacgagtgagcaaagcagagcgcgaagaacgtggcaacgtgttcaaggagcggtggtagtgaccttgccatcgctgatgatacctggctgccaggtgtttgaatagtgcgcgattcttgagtcagcgccgacgagatacgacggcatatagtcgtcaaaggacgcaccgcgctctgccttcatcgggatacaattagttcgtcaaacaataagcatggctggggagcagtcaagacaactgtcttgttctttgtcaagacattacaaatactggcgactgccgaccggatactcccgcatcagtagcagcgctgaacttgtcttcggtgaatcagcgaaagacgcgcagaactgaactgcaccgcgtgtcattatcatttgtaagattccttaatcgaaacaactcacaaccagctgcgaaaccagaagtatgtctggaagttgctactcacccggtccacactattgagctgcttcacttccgcgccagaaacgtgaatccttggaacggtatcagccgcgggtgtccgtcagcgaacgggtcggcgctctcactcgtagcctctcctccctcctggtagaaattctcctgcgcgtccttctccagcagcttggtcagcgtcgtctggaactcctcctgcgtcatcctctcgaggaacttggccgcgaacgggttgctcatcatcccctgcagcatcgtcttggggtcctcaaacacaatcgtgtgcgtggtgcgatacacctggacgtctttaaatccggcctcctgcagctccttcgacatcctcactcggtcggtcgctgcagtcagcgtcgggtatgccaacggccccccttctccctctctgccattgaaaatgtccgtcacggcgtcgaaccataccatctgcgagctcttctcgtcccacgccgtgacgaccagcagcccgtcgtctttcagcacgcggtgggcggtgacccacccgcgactgcggttcgggaagatgcccagcccgaagttggagcccaggatgtccactgacgcgtcggacacttggtccagcaccatcccgtcgctctgcaaggtggtgaacctgtccgcgaatggcttcaacgcggaatcttcttgcagtttctccttcaactgctgcaacattccctcggacagatccgacaccgtgatgcgaatttccgcggggagagcgaggtaccgacgagcgaactcgaagctgaagacgccgggcccacagccgacgtccaggaagtggaacgcggtcttggatccattggcttcgtgctgctggagcttgtggaggatctcgcggtgcgcgacctgcagcgagtcagcggcccagcgagcggtcaatgaggcgaagccggagctgtacgacttggcgtgcgcagaccacttggcgttcgtgaaggttctttccatggaggccggatggggtgtctttgacagtgaagtcaagtgcctgaagaggcgcagaggactcgtggcggtatggtgtaaaactgtggactatatggttttgtaaaagacaagttgatgtgctggataaatgaaaatgctcctgtgcaaggtatttgcaattcggacttgcttgctgcaacttcgccagcggcaagtgaacccgcaataatggtagcctagatacttgtagtccgaccgagttgtgatagcggcaacataaggctgtgttcgctgagaaaaaataaaagtaagacgtgataaaatatttatagggctcgtatttgttagtccggcggcgttggtccggtcaacgccttgccagcgctccaaaacccagcacctacatcaaatccacagccgagagcctggaggaaccgccatcctacgaagggtatgcgccgctatttcgagctcgggagaccctccctcccaccatctttggtgctcaggatgaaactggaagcacccaatcacggcactacatgtacatgaatgcactgtaccaaacaacactacaatactcgggagtgaaatgaacgttattattctgtttcaactcgattttatcatccgcaccgaactcgaactagggtgtgtttgattctagcatttagtggagacaccgattcgcggaaatgcacgtgccgacatgtgccgttgcaaaacaactacttaatgccgtggttgatcttcagtgcctgcaatctgagccaatcctcgtggtcgcctgcttccttcagagctttttcgatttttgcgatacttaagtatgtttcttagccttggctggatcagggcttcgcattatgtggtaatactcaatacggtattaatacagcaccccatgcctactgtattgctactgggtgcaccactatctggcttatgtattagctgcattactatagttgtagtttgtattattacggtcgtaatacagacggggccatgtctaccagtacgtagagtgcccgcaactggcattgaatcccaacactttagcttgcaatgggcttgaatagcctgctgtcgatctgggctcccgtggcatggatgaccgagatatcgaaccaccgaaacgcgctccatcctatactttcattccttcacggaaaaccctctctcttcgccgatgtcttcgtacttctcgacacgacgaagcattcgtccgccatccgcgtcgaataaatcggttgcagcaggcgacgcatcgttcttgaccccagcgttgagcttgttggccgaaggaagtgaggcaccactgacgtgaagagtggccgcaatgaccagcgcgaagatgaaagcgaggcgcataccgattatcggcccttgggtagcgggagcgtgttgcgcgcttcaaagtaagttgtgaagtgagttcatttagagttggataaagctccgtagcgccactggggcgtgccgggtggcagtcactagtctacagctccgcagtaccaattactggactgtactgggtgctgattatgttttgagttgattgcgatttacaaagccggcagccgacgggtatacatacatacatacatacatacatacatacatacatacatacatacatacatacatacatacatacatacatacatacatacatacatacatacatacatacatacatacatacatacatacatacatacatacatacatacatacatacatacatacatacatacatacatacatacatacatacatacatacatacatacatacatacatacatacatacatacatacatacatacatacatacatacatacatacatacatacatacatacatacatacatacatacatacatacatacatacatacatacatacatacatacatacatacatacatacatacatacatacatacagtgacacctccctaaatgaacccctctaactgactatgtgttccctatctggttaggattcctcgagtgcaaacgggattatatggatttcactaggtgttctataactgatcaaaaacctctttattctctaaatggtcgccattgttggcgcctcaaaaaaatggacgccgtagtaatagatccaaactcatatatttctcaatcacttgcctgcctactcccacgtatgccattgctaccactactcccgccacaacaaatcgagcgaagagagaatttatatttgggatgctaagttggaacaaagagtttgcggtaactgcaagcttgtaaatgctgataaataagctagccacagtattttacaatcagcgcagcgtacatatatattttacgaaaaactaaaatattatgatgtcgagacaactaggggctatgcagtagataccaagcaaaaaataaaactgcaggcatggtggcaggatatcgggacaacaaatattcccataacctcactgtattgaaactcgcgtacaacctgaggggatgcgattctgctaataccaatgagaagaaggagtaggaacagacaatacagcgcctaccgttattggttaagttctgtctgtgtgaggacgaaacaaaacaagagtacgaaaatgctggaagggtaccaggtaaagaaagcccttgtattgtgcacctaatatatgaaaatgtagccattagaagtgtagccatttctttgtctgatcaattccttaactgaaacagcgtacttagtattagaccgagcgaactggtgtcatttatagaggtgtgactgtacttaagccactttttaagaccatcggcaccgccttcattataaccaatagaccccaaacactggacaaaaattagaatccatatgtttttgatggaaaccttcgagttcttatctgcatttactggggttggtatgccctcacttcaacaatggcgaaggccgcaagaagcaagagcaccaagaaagcttacatgtccgcgacaatagcaatgattataattagcgccgttggcgcggctcttgctgtcgccattatccgtcgagctgcagaataggtgtcgtcctttaagtgtcgatcgtctggtccaatcctccacagttacatgtatccatgtacaagtggtggtttgtaggatttcgacgaaaccagagcaagctccaacgcaacatcattcggctacaatccgacgccgtgatgcgggtttgcgctgggagattgaggtttaatatcgacgtgcgagctcgaagcttaagacgccgggaggtggaacgggaccttgggactcgcttgatagaagagagattctcttagccacggtacttgccggaagcaattagcaacttacatgttactaccatgatgttagccagcgccaatgcctcaagcacagtgtgaggcgctgcggaggtgggtttatgaaccgactggcagtgaaaaataaaagtgagatgtgctagaatatttatagggctcgtattgttagtctgggccagcgccacctttggtctggtcaacgccttgtcaacgcccctaccaggaaggacttcggtgacgaaaagcgctcctgcttgcctcctcgagtggttgctgcactccacgctctgccagcttctcggggctatcgactagctatgaaagagcgcttgggtgaaatcctggcgctgcgcagcgtgacggatgcactccaccaggaggacatggtcaaggtgctgggcgaagtcaccatcgtctcggacgagtacttacccgtgctcgaattcctcatggccccagataatcgtaagcactttataaagttgctctggatctagtaaactaaccaaatggttcagtcacgtgtctgatcagctcgatgctccaagagccaacaccaactgcagcggccacagctgcagcagctcgagagcctggagaaccgccgtcatacgaagaatatgcgacggccttccgagctcactgggttttgtgcggctctggcttctctcaccagcttttggcagcgctcagtgctctgaaaggcgagccccgggtgctggtagcttgcaccctggccgagttcaattcgcgcgacaatatgacgctcgaggcgttctctcggttcctcacggcgttcatggatcaatattccccgcagatgttcatgtcgctcttcgacaccagtagtcggcagcagaaaacgtttctcgagtcgctgctcttgttggtattttacgagccgctgcgcgatgtcatggtgcgtttgtgtaacgaactacctggggccgacgccgaaccagaggtagagtcgcttgtgggccttgcattgttgcaattatcgccgatgaatcctgtccagagtctacgggagcgcgtgcacgagaagtttcaccagcgagtggcaagtgacgtcgagactgtacgattcgcacgcatgttatttacctgcgacttacttaccgacctcatccacgagaagcgagaaggcagcttgggctttgcgatgatgctgtcgctcagcgagtcggggcctagtgtgaagcaactaattgaagcagccgtgcgagacttgtgtgagctgccaacgttgttcgcaaatgagtcgtacgcgctgaaagttctcaactcgttgctacagcagacgcagtgtggctgcgtcactaaggcagcattttgccgagcgactgcatcaatccaagacaaaggtgctaatggtcaagctgatcaaccaaaagtaggagaaggtggagacccgatcgctgccgcttgcacccaggggagtccgcatgaagacctgccgctgatctggcatgaattcctcacgcacctaccgacgctactggcgttcttctcgttgacatcccccgacgctgcttctctacgatggcgcttcaaatctacacacgtgcagcttgtgtatctcatgctgccggtcctcaacgtttcatgcaccgtggcggacacgcttttgatccacaatcgaacgctggacgcacttctcgagctgatcttgcggttcccaaaggcgtcgattttgcactgcgccatcgcacggttgttcatcgtcgctctcgaggactcgccatacatgtttggcaaggagctgccagccttccgctcccctacagacccgctgcgaattcatttgcttctgggtggcgtgctggactatgtgctgcaaacgtttggatggacaatcgtgcctgaacaagacgtcatcgcagctcaaaacacgaagaataccttgccacctcctgcattcctggacgtcgctatttccttagatcaagctctcaccagtgcgtttgcccattctgcacagctctttatgggcaattcggcttttgaacgctggaaggtcttccgccttgtagttctgctgcctatccaaacgctatgggaggagcagtatcaacccccacctgcagtcgatatgggcccttcaccgatgctggcagcgatgttatacggagaaaactgccacaatcagccacaagaagacacgccgacggatacaaagcaccacaaggaacggaaacactctacggacggaatcactgctgcaatgagtgctgcagtttctgtacaaagtacaagtaaagaaccaaagactgaatcgactgcagctccaaacgtcgaagagagtgtcaacgctcgaccggaagcaccgacagttgctcttactgaagacgctgccaaagctccagcgcaagctccagcgcaagctccagcgcaagctgtaccacaagaaggaccgtgcgtggcggtattaattccgcaacctaccgtgacttcggaaagttcagcaccagcagtccacgatgtaccgacgccactggcagcgctgtataatgaagatgagaaacgcctgatgctcaaagtgtctggtagcgacgacaaagtgtcttcgtcgccgccgattgccctcgtgatgcccgccacagtaccgcaaaccacatgaactactgcttttactgagcttctactacgttcaatggccgaaataataaaatgccaaggactggcttgagcaccccccaacgccattatttgttgatgttgttgttgtacatgtatcacctggtgccccgcagacgaagtcttaggtcactgaaaaatgtcagtaaaatcactgctacaaaaacctgtatgtacaagcagcagtgctaagggccaatctggccgtggtcggtacgtcgttgaaagtttctgcgagttttagctcggttcagcaactaccctgtaatttgtagagcagaaagctacagtaaggccttaaaggaccgcttaacattgtcttggtggtagcagcgaaaacgtctgctaaaaagactggatgtcgtagatagggtgaacttaactgagcagtagcggggttctcccgaaagaaagtggcctaaaggcctactgggtggggtacatgtataccgttgcaatttgttattaggaggtcacccgaggcacgttacatgacgggtctataaactgaccggtaatattgcacagccgttttggtattttcagagaaaagagggggggggggggaacgggagggtccaacttgcactggaaaatataagcaactattttttactctgtagagcagaagctacagtgacactttgtgctgcgttcgaaactccgttacttcttgatgcaaattcttcactgagaggagacataaatgaatatttcaaagtattatggcgtgggcctgcgcagcaagggtaattaatagtaaaggtaggaattggaccagctcatacatacatggaccaaaaatatgcattgatttgtcttcggccgtgatcacccaccttgaaaactacgaatcaaacatcacgcaacatctattaatgcatgtagaatgttcggttttgcagctatatgtatcaaagcaccataaagaatcctatcttattattgaggggcattttggtcaagcaacaaatccacacaacgagccctcatgttattaagccctactagggtctgcacaaagagtactcagcaaaaatcgatctatttaccggaataactacacgagattgtagattacagactgacagtactaatgatcgtagttgatgtacatgtattttattcgtaagcgcgtgttaccattgctgccgtgtctaattggatcctatatcacatatactcccgggatactatcgatattatatgacacttgctatctaaaatggaaaaatatagagttagcagtgctaactatatacttcagtacatgtttgtagtaacttatcacctactgaagacaaccactaattgtaggaacatgattgtcttcgtgccagcgtcaatagtcatttggcgacagtcgtggcacggcaatatagtagacgcagtttcggttggacaggttggcctggtaagcgatatcaactaaatggcctctcccatagcggccgccaagtaaagctgaatataaggcaaacatagaagtgctactgcgctttcgcctggcattcgttgcattctgtgatgcctaataatggtaggattggcttcgagacttcatgtgggcggattgtgtgtactgaagtaatggctttcgctagcctgtcgagatgtatagcaacactggcctgctgtgcagctactgaggcagctcctccgtgccgcataccgacggcccacgattactcacgaaaaaagccccaacattttcacaactgactaaaactatacaggcacaatccaccgacgctaccagttctacctggcgttctacgcaagtaggcttaaaaaagcttagtgaaaactgcaaaccaattcacagggccttagcaagagaaataatgcaagatagtagtagcatcgtctgggtacgtggaccggcgggcctcatggacgtatgacttttacgtcctgtgacgccgacttttatgaaggcctaaaccttagtaaaacatttgtatcgtttcagattttgaagcactgataacagtagcttccgttttccagaaatttccggccaagcgaagcgaggcgggcagtctcacgtgcttggcttagacctgttcaaagagccccgcttgcggggctccgcttggtttgtactgggataggaagcgacgaactgataacccagcccaaacaggattaattcgggcgctgtccccccgttcaatcgacaccggtgttgaaccggtaacatgtcttaggtcaatttacagtaagtgatgtcgattggccgagtgttctagacttctcaagaatgatggaggctggtccagttcatttgcgaattcgtcgagttaagattcgttttattgattttgctctaaaatcgattgtacgtcgagatcatagcggtgatacattgtcgggcagattctgcggctgcgaagcagccgcaggagatgcccttggagcgtgcggatcgcgtaaatataccggtaagtgtgagcgcttacaaaacagcatggtttgatattttggcgcaggtcttactaacatgactaacgagaccgaatcaggggtcgaccagcgatcccctacgagtctagctccagcaggccagtctcgagtccgaggacaagtgcgcgttcctgtggtttgtatgtgctcgctcgcgtctgcccttggcccctgcgcagttccaccagaagttcaagatctaagcgatggcgtcgtcagggaccagggacagcggcagtcccgccggaggatcgacaacaggctggatggactcacagatgccgcaattcaatgtatcatcggcgttagtggaacgctacacctttgcccgaccatagctggcctaatccgcaagcaaagttgtcatgaatattggaagtaccaggaagtaacattacattccttaacacgggtcatctattgcgatcaggcgacaaatcgacgatcttcggaggtcaaccgaaattcgaagatcaataaatttgcttatacagacacgagattcgaagaggggttagagcacacgaatctaagcatagtgaggggtatccgggtcctggcacccgcattgttgctcagttatgggtcgccgaagttggaattcttgttcaggggacagcatagtaggttcttctacatatatgaacgtttttgaagtattgttttggcacaagcaccttgaaattgagcggtgaatcaggcgtatgttttccatctagatgacagtggtcaaaacggcacgaatcgattccaagctagatgacgatgttacagacttattcactcctactcaggggtagtaagcattcatatgcacctacccataaaaccaaataggctgtgcatcgatactcgactcgggggcatcctccgaaatctcacctgatcgcaagagatgacccgtgttaaagtatgattttcgtttcattcaaacttgtctaattccggttttgcggtgaaatgttagtaaaggggatgtttcatacgaggtaggataaatggggtacagtaatttgcctcaatagcgtcatggctacatatatacgttctctaagataattgcataggagaggctagatgaactttccattgggtggattgtgtcgtagacggctactcgtttcagcaggttattagccatgactacgctattgaggcaaattattgtacactttctcggccaatcacacacagaccacgattttctaccccagctgccccgagatttgagctcgggcccatttatcctattaatatacatcgggcaaccgcatcgtcttgatcctgcatttggactgcgacgctcttgtgctagcacgttgtgggtacgacgcttgtcatggcggtcacaaccgtactggatcaaccgcttttgcctcatgcaatcttagctcgtgcttttgtacaccaccgcttacccacgaccccgcgcgaattgattcaaagcggcctgggcttcctctggagtggagaacacctgctcaggaaggcaatccatataccacgttggtgcgcccgcagcatacgaatgctagatcgactgagtggagagtggttgatactccgctggcggcaataacgaccctggcaaggctggacgagatggtggcggttgatgggaagctacccagccgggggcttgcccggtgtaatagaatcccgcaaccatcgatggggagcgcatcggccgaggcgatatcgatttttgatcgcttttcacagttggctggaccgtgggcgataacgacgtcactgtagtcggccggtgcggcagcggcgccatcgccaacatgaccagctctattgggtcaactgttgccgctgggttcgccatggtgaacggtggagtcgaatgagctggcaatgttggtagcagctccatagtagagaacagaggcggctgtcttgcttgcaccacaggctgcacaaccgatgttgcctggactagtggcgttcgcacttgcacagattgcgaccccgaggctactacgagattcagccttcccgaagtaagagattgggctacagccccaggtgggtctatcgggttggcggtggaacacgctgagcttgtgtcttgagtcaggagttgtcccgcttgaagagccacaccgttggacggattgagggctgcaagaagctcagtcggaggcgccaagctcggtagcgctgttgcaccgtcacaggttccattgtcgggcaaacgaggcatagtgtccattctggcgaagatcggtctctttatccgtttgtattacgagatgtaatgcttggcgtttgtacttttgctgctggttctgagacttgctggtccaatcagttaagcaccaacaaacagctcaaatatgtcaacgttttggacaatgtcttgtgtcttgtcgtaaagtcagttggtcagtacagcaccctctgcggttatcgggacccgctctgttgatatcaactcccgtattccccacttcagaacgcctcgggctggtgttctgaaaaacacgtttttcagaacccggaatcagaataaggtacactgtaccgttttcaaacagccaatcactcaaggatttgggggtcccagaacatattccggtacctggaccagggccttatgtactgttcttgctgacctggtgggggtgcaggtatcaaataccttcaaaaccaattttctctgatacatatatgtatgtatagaggtttccgtgttcagagttttctccggcgaagcacgacttttgccaactgtattaacaggtaatacgtctctatgatttacttcgtgaaaattcatgtattatatttataatatgtacaagttttgtgctttgcaatgattttggcaatagaagacgatattgtacaagacgaggtttgctggattaatagcggctgtacctgctactgtacacagcaaaacaactgcaaaacacaatacatgttgcacctacagtagcggtagtcagagttggatgcaagagcggttgcaagagaaaaaacgtcagtgattgctcaaaataatcttagaacccaagagatcttaccctagctacatgtactgaggctcatggagtccaagagacgggtgatggcgccgattggctaaatttacctcttggagataactcttgcatccaacgctgactaccgctattagtacatgtaccaaagtttgtacaccgacgcagaataggaaaacttcccgtcaatgctcagcacgtgttcatggatcgcatttgttcgtagttcgaagaactatcgtagtggggtctaccaaaggcggcgcgttttgatcgtgcgaccttcgggcgacgttcggtagccattcaggcggcgttcgggcgacatcggacggggatgttgcggtcggtgggtcacttgcagaacgaccgcgaccgcagaggatcgagcgctcgacagcgcgcgagcgcgctcgcacagcgcacgcgctccgcaatcgccgtcggggacggcgacagtagttttagcgcgagtcttgagtgctgcagctagtcaagatgcacacggtgcgccaatgcattcattgagggagtgacgaaacttcacgagtaaagtccagaggtgcgtgtgcaatgtgcatgcacttgcaaggtggtcgctaacgtgttgattatcgatgttagtgactttcaaagcattctggttcattgtatttcgctgggagttgggtggctgcttggattggggcctcggtctgccacgttggcggtcactggcaggtggaaacccgccaacgtggcatcgatgaggccacttagccgctcttcttcctgtatcgcgtgcgccggtagcctggaccacactgccagcttcgctgtcataggttgtagagctagtagtccattgcgtgttgtaaccctcgagacaagtagataagtctgttgcggcttgttaatcacggccatcgacgacttccagtccacgacgaccatcgaccgcagcgtttccccttggaccttgtacacggtcgagccgaccgcgcacacgaagggaaattgctgcggtcgcacggtaacggagcgcggctggccgtcgggcgctggcgcgagcctgattgtggtcttcttataggccttcgtgttgaagaagacaggaaacaactccgggtcgccgcccggccgcaccgcgacggcctgcgggcctggcacgcggatcacggcgtactcaggtgcacggcttggcaggcgcacgaccatcgacgttgcagcatcacaggcgagccggaactcggtgtcgaccgggaagtggacgtactcgagtcggccgagcgtgccgttcgcgatgcccttcgccgtcgtgacgttctgggtcacctggatcggcatgccgtccacgagatcaaggtacgtggccatccgtccgaaacgattgtcggggagactcagcacgtaccgcaggtcgctctcactaagcgcgttcagcgcacctttgaagtttgcgaccacgcgtgtcggatagactccgcgtggcaggaccaacgcggtcgccttcatgaaggcgttgttgattgcgagccgagtggcgttctcgggtgtcacgaacgcggacgacacgcaggcactgccgcgagggatcgccttcgtgcagctcgtggttgcacacgcgggcgttgatcattgccatgaactcgggcgtccggtgccccaggcgcgcatttcgacagtcttctccccattccggatcgtcgcgaaagcggaccgactcgtccagaacgacgatggttgtaacctggcgccacaacgcaaagccctggaggtcggcggtgcttggccgcggcttggaggtggggtccaagtagattcgatccgcccttaccggcggcatctgcaggatgtcgccgacgagcacgatgtgcacgccgccgaacggcacgcactcgacgtgcatgtaccgacgcaacaggtggtcgagcttcagccattcggtcttgttcatcatggagatctcgtctacgacgagtaggtcaagcggcgcaaactgcttttccttggtggtttgttcgaggcggatgaggaagctcgcgagcgttcgcccgctgatgagcgttgccgccttaccagtttgcgcggtcttgatcatggacttactgcggcgccagccgctgcagaacgagtcgacggcgtcgatgaagcggctttttcccgtgccaccggcgccgccgaggaacatgagcaactggtcgtctcgcagttggtccgtgtaggcgggcgttcggtagtcggctgactcgtcggtggctgcgcgctcttgctgctcaaaccgacggagcaacgcggtggtgatcaagcaaaaggcgatgtgctgacggtaattcagcgtgaatgcagccgagacgctgctgattgtcggatacgcgtctaccgctggtggtagacagccgtgtcgctcgctaggctgtcgtcgcggccaagcctccgccgatgacgtcgcggaccgagctcgagctagaatccattgagtgctcggtcaggtttacagcggggctgacgtttccttcctgacagcgttcggtcgcagacgagtgttgccgctttactcaccagcgcacgaggaagctcgcgagcgtacgttgccgcttcaccggtcggcgctgtaacgacagcgttgccgcttcaccggtcagcgctgcaacgacatcgttgccgctttatcggtcagcgctgcaacgataacttcgatgagggcaagcatacgacgcccacaatcggtatttcacgacgcccaacggattcaatgcgcatcgccactcatttacaacggcagcgcccaacgaaggccgccgccgacaccgtgccgtgtagcagcgcagttggcctccatatctcaactatcgtccacgacctcgcctatcgagctagttgcattcgatgccgccaaagaaacacgccaaggcccagcactgcgatgagcctgtcgcgtcggccgctacgctcacgtctgcggctgtggtcgcagccccattgtccacgcccacgatggtgacgcctttcggcagacgttcgccgtcgatcccgacgccggtaccgatgccgacgtctacgccgatgtccacaacgatgccagacctgtcttcgcctgtggctcctcgggaaaagccaaagcacgagcgcatatcaagcaaccaggagcaacttgagtacgtctcgcccgtcaagaagttgaagaagtacctggaggcgcacaaaccgcgcgtgatcgacaacactagtctctaagaaccgccagtctggttctgacgttgttgcgtgtctatcattgttgagatttgcggacgtttattgccagcaacgacatgagtgatccccagatccgcggatctgtgcggattcaggcgcgcctcttgtggaccgccgaggacgacacccacagagcgcgcttcctgcgcgtctatctgggggaccagtgagcgcctgagccactggatgaccagcaaaaggtactgcactacatcgtcggtccactcaagcattatgcggctctggcacatcattgtcgtacaggtctaccaagatgcgcagcgcgagaacacatttgaagcaaacaaatacctcatcacgctgtcactatacgacatcaagaaggataatccgatgctaccaccaccgggctcaatcgtgacggtcgtgacgactaagccccgcatttacaacgattgctgccagatcgacagcaagctccacatgatctcgacgatcgctccaccatgaagcggtcgtcgccgcaacacggttgtcgatgtcgccgccgctactgccggagctactacgactagctactgctgcagtcaggcccgcgggacggagcgccgcactcatggattgatcattcacgcactctgcattcgcctgcggagcattcgagattcccgccataaccgattcaacaaatcagtagctactacatccgtctgccagctcgaatcattcactatggaattctgaaaccaacgtccgcgcgcagacattagcttgcccccccccccccccaacttcgaactacgcatccccaggcttcagcctggtctccaatatggtccttcgtttttgtttgtgaccagcacctattaataccctcggatgaaacaccccctaatcaatcccatcccagccttcgcgaagcccaagtttaatcacgttgctagttaagagttgcattagaattgtttgatgagaccactttttggtctcatcaaacaattccccgtgattaagcttttatgcgcgacttttggtgagggttttggaaggcgcccagtagtggttggtgatgctttcggactttgcgctaacgttgtataaagattacaaaacaaaactcacaactattaatccctgagattatcttcagctgatgcttcgggatgtctccatatattcgatttactgtgctgtacgcaagagatcggcccaccatcgagttgccccgctagtattattcttacccacgcatgcttggttagccgtataataccagccacaccagcgcggtctgtgtgacacgcaattcacctatcacttcattctacaatagcctacaaacctcgctgtggagtgttgagacgatggataccgaggaggacgctgacgacgcagctcgccagacagtgacagcttaaccgacagcaggacccaatgaccacgtcaacactacacctgcataatcgccgccgcgtcaacggcgccatgcataatcctgggctgctgtcacacatgtacctggtactgcggagctgtagggcgggcacatccggtatgcgcctcactttcgtcttcgcgcttgtcgtcaccctccatgccagtggtgcatcgctcccttcggccaaggataccaacactatggttcagaacgatgcgtctcctgctgtcacggatttgaccggcgcggacggtggacggatgcttcgtcgtgccgagaaggacgaagatgatagcgaagaagagagaaggcttttctggagtaaacttagggtgaagcttaaactcaccaatatagccaaggaggcgaagatgcccgacaaaatcaaagagttcctgaaggaagcagccgacgaaaggaagtctcttgaacaggcggcgttgatgcttaaagaaaccacttagttgttttgcaacgacgcatgttactaccgcaggctagaattagaatggaacagaatgcgtgctatcggcttcatactggggggggggctaggcacacatcgccaaactaaaagctcgacttcgccaagtgtacaggcaagtaacacttgacacaccgcttacgaagacgagatatccggaatggcaggtggcgcaatggatgcaagcggcgctgccgacaacggcacaacccgccactggtaccttggcacctacaactaggcatccggtgggcctatttcatggccgatcaacgcactgcaagccagaggtcgaaaaaatagtgcaatacaataaataatcagtgtttccaatactattttttattattggcctgtgctgagatcaatacaatatgaaattgacccaattattgacaataaatttgttaaaagtaactacgtggtcagattagcctgaaatagacccaacatatgttctaagctgcagcttcttggtcaacataacccccaccctggagttataatcgataagtacgatgcacatactgatatcaatgacatgcataaagtttgtctgcaaataactccattcagtaccgattagataacactaaggattagaatatggaatagtaggggcggtaggaagacctactgacaagggctaccaagagcgcatcatctcgtctaagacccctctgcgcaatggctgccagggatgatgtatattattccatgtattgtgctttgcagttatttagccgacgattttagacgctaaatatgacaaagcctgctcctaaatatttgtgaaagaagatacacgacctgctaaaattatgcataaatccacctcctcatatatttatcgacttgggagggcctgtcagcagccatgcattggcccagtagaccaccgtccatgatccccagctcatccaccctcttatgcataattgccgtgtgtgtaggtgcttgtggataaaacccgacagaattgcagctgcacagccacaattgcactttcaaaagtgcaattgtggcacttttagcgtaattctaggcctccacccatttatgcacctcgatttatcgtatatctagcaggtggttgctataaatacagcaaatctcgcctcatattgccaaaatcattgaatgaataaatgatgtacgtgttcgcgtagccatattacacctgcgctaggctcaacttagctagtcggcggcatagtgtggtgtccgcatacgtcgagtcaccagtagctgacagcgagtcagcaattccagccatcagaatcttccatttcagtctgtcaccagcaagtgtgcggagtccctcgagatcttgcgcgttccgaagtcggtagccttggccactggctacgaggtcagcgtcaagtacgacaggaagggttgtgcgggggcgaccgcgccattggtctgcttcgctgggggcgtagtaggcagccatttgtgtgtaggcacggatgtccggccgtcggagaatgtgtccaaagagtccccatcgggctgccacgactcggtggcgacaaaatcattgcaaagcacaatattgtgcctttcacttattctgccgtgataattatggcaaactctaatccctcattgaccttaattatgccccgagttagctaattcccatgttaattccgggtcgtctattcgtggccgaattaggagcggcgatggcgaggccgagttaaggcggaataagctaatccagtctgcttttggcggaaacagagcaattggcggtttcctacccgccaatcatgccaccctgctcgtattggctctcgaatgctgatcgcggaggttcggggaagcactgacaatcttaggcagaattagcactaaataagcgttgatcgcccttttatgactctaattccgcctgaattaacagctcacccgccaaaatacgtgaaaggcacaatattgtgctttgcaatggttttggcaatatgaggcgagatttgctgtatttatagcaaccacctgctagatatacgataaatcgaggtgcataaatgggtggaggcctagaattacgctaaaagtgccacaattgcacttttgaaagtgcaattgtggctgtgcagctgcaattctgtcgggttttatccacaagcacctacacacacggcaattatgcataagagggtggatgagctggggatcatggacggtggtctactgggccaatgcatggctgctgacaggccctcccaagtcgataaatatatgaggaggtggatttatgcataattttagcaggtcgtgtatcttctttcacaaatatttaggagcaggctttgtcatatttagcgtctaaaatcgtcggctaaataactgcaaagcacaatagtatatatatatatatatatacgatcacatgtagtacggaactcacatgagttttactactgtacgctccatagaacctcctcaaatatatatgtcacctgttcaatccgatatttttttgcccttgttatatgataattcaatataaatttcaatataaattgcggcaatttttattagtgcttatcgtaaaattgcagtttttatttgtggccaatgttgaccccaattcaatatcatactgtattggcggacctctgctgcaaacggaacgggggtatggtctttgagtgggtgggcacgacggcgccaggaaaaccctgcataatggctggggacacaggaggatgctggcatcggcttgctgttcaacgaacacggcggcgctaaagtcgcttttctacttactgaccagagcatcgaagctaaatttgcgcgggattaacgtggccggagacgcaatggtggtgatccgataccttcgcgacagacggagaattttaaaacctggtaccttcagcgccgacggctagcagatcggattcgggtagatgcctgacatcatatctacccgagctctaatacaggatgtgtgctactcgcttcggacggaccgacagtagtcgattgtttgaccagcagcttaccctcactggagcaagctatacgacaatacatctctaatatagatgtattattattatgctctcgcgcggacaactggaagcgggtagccattgtggcagccgaaggcagaactagataatgccaagttgctggtcttttgactggctaggttgctaggattcttttaagcaattccatatacctcatcctcatggaaagcactcagctgggcaccaactgcaaggatcagtacctatataatccacaacagactgtaccaagcaacactacaaaactcgggagcaaaagcaacgattttattcttttcccactcgagtttattccccacccaactcgtgtgtttggtctcgtagcgtgattctagcatttagtggggacaccgattcgcggtgatgcacgtgtcagtggccatacccgacatgtgccgtcgcaaagcaactagaaaatgccgtgtttggccttcagagcctgcaattggagccaagcgttgtggtcgcctgcttccttcagagcattttcgattttttcgatatgcttcttagccttggctggattgaacttcgcgaacaactgcttgatggaaaaccctcgatgtcttcgtacttctcgacacgacgaagcattcgtccgccattcccgtcgattaaatcggtggcagcaggagacgcatcgtacttgatcacagtgttgggatccttggccgaaaaaattgacgcaccactggcgtggacagtcaccgcaatgagcagcgcgaacatgaaagcgaggcgcatactgacagttgggtcttgagaacgcagcggagaaagtaggtcgagggagtgtttggtttttgcttgtggggttgcagagcaaattgcggaatgaagtgtgcgagagcttctgttttgcggagcttggacgtcaggcagggcgtgtatcgcgtacgcacgtacgcacacagtggactacatggaacggtgggctacatacgatagataaatattgcggtcgctcgcgaagatgctttgtccatgccagtagtgatattcagatcctaataacgttttgcttatgcaggtattatatatgattgcggtattgtttcgtgcgaatcgccatttgtacgaggattaaaatatacacatttggaatatacaaaatgttaacattatactgataccaaggccaaacactagttttgtgcgagctttttgtcaagctgctgtgtgtaggaccatagctacgcatcatactaggtgtgaactaattgatgttataagcgtgcaatatgtgagcaacgaccgggtagtcaatgcggtatttcgaatgtaaaatagcagcggccaatgctaccacaaaatcaagaaaacgatcgttgattgagatcgatttgcagattgtagaaaatgctaatgctaacctttgcgctagtggcattgtacagtagtcaatcgttctctccatcaattcgtacggtacagggtttagcatatgtcactgagtcatacaggtgctgtcggtagttcgatctgaccacgcatataaacctgcaccggggacataccggtttccaaggagatggcagcagcatacatatcgctaccggtaattactgttatcccagcataagactatacatctgataaagtttgctagcccccccccccccccccctccgccaaaatttaggaattggtttaggattgagaaaatggcggcggaaatcgctccattaccgcaaaacccggataaatgcagcaccattttactataagacaatgtatggtgctgcatttttccgataggtgcagtaaattcaagtagaacctgatgtgatcaaaacacggtaccaagtttagattacggatcactttacggttgaacttgagagcaggcgaggctcgacagccgtccctgctggacgcgtgggatttcagaatcaaccaactctcgaagccacttcaccccacgcgacctccacaatgcccagggaacgaattcctctgtcctacaccaacgctttcaagctgcaactcgtgctcgactacatcgccgccgccaaggacggcatgaccagaaaagcgttttgcacgctacgcgatgtcaaacgctcaacgctgcaaacatggcagcggaagctcaataagctgatcgctgtgtcggagcgccgaggaacagcccacccgtctcgcgcaaacaggctgacacttggaggcagcggccgagtctcaccgtccgcgcctgtcaaagacgccgttgtgaccttcatcaaggccgcgaggcgggaggaacaagtggtgacgcgcgacaggataatcgcaaaggcagcggagctggcgccggcgttcatggagggcaaaagcgtcgacgcccccgggaaaaagggactgggattttgccatcgctgccggatacagccgacggctgggaacaagagaaagtaaaaaaaaacagctggaagcgctagcatcacgcattacaagaacacgcatgcatagaacagtgcgggttattctggcgtcaggtcgacagcagagcgttgtacgtcattgcgaagcactgtaccgcaaaaaccggatagatgcagcactcgcaaaaatgcagcactccgtatcggttgtatagaaaacagtagccaatcagcgttaacggagagttacctgtcccatcacctcatctcgttttgaacgaatcgtcaaaagtggatagacttgaaatttgtattcaaagagttaccgtactaatttgattaagtacgtttgcacgagatctcaaccgtgacgtggagggccgcactggacgaatggcccagccttgtgaaacgcgttgcgcactgtgtcttcggtgatcctctcccagcccgatatcgcgcggcagtacatgccgtatcgacgctcagctgatgttatcttgcggggtcttccagctggacggttcgagtagcacttgcgaatgtgctgtttcaacggcgccatgacgccaacatccagcggctggaccacccccgtgcagccaccgggcacgaactgcacggccgtcccagtgcacgccagtgcatcgagcacttccgccatcttgtgaaccttcaaactatctaatatcagtagcgatggctccgtcacgataggcttccacgcgttttcgatccagtcgagcatgactcgaagatcgaaccacgcctttgcctggaccgaaaacgtggcgacttcctcctcgcagtaacttctgacctccctctcgacgtcgccaccaggctgtccttggaacacaaaatgcggggggaacttgcgcccatcggccgcaacagtcacggccatggtgcagcggtagctgtcgcttccttccgtcagcgttgacacgcgcgtagccccaaccacccccaccgtagttcgcgaggccatcgtactgtaaatggacgtttggtccatattgaaaatggttcgtttaggcgcgaggcccaggcgggggtcgaaacagtgctcctgggcgactttcagcacctccgagacaaacgagagccttgcttcttctagatcgcttcttgtctttcgtccagagtggatgatgcggcgaatcgttaggccgttgtgacgtatgaagcgcgtgcaccactaaaacgtcaaaaggtgtatgaatttgaaacgttttgtcaaaagcggttaacacgtgccattaggtgtatgctaggttgtcggtatgacagtatgtgtatgtggttttaagcgcactaaggtgcgtgataaagctgcatcagcaacgaatgtggtgactggtgtgtgggcttatatccaaatccataaaacccggggttaggaagtagcccggttcgtggtgtccatgactttggtagcgaattgtacggctgagggacaccaatgaacgtcgttatccattgtagccaggcctcagcgttgccataattctacaatacctacactctccccccggttgggggctctcgctagagctccttcacctccgaaattcagatgcaaaacctacctaatatagccatgctatacacgcttgcgttggtagttccttgtagctacaatagcgaagttgtcgagtacagttgctctatatgctattattagttgaccgtgttcgctacaagcgtgtcgttaataaactactgtgcttgaaagctcaatcctgggtctgtatgaccctacctcggccgaactgggacgccactgggacttggtgggacttttaaaccggtagcagaatttctgaaccggtaacacaaagaaaggtccatttcggctggatatctttcggataactattcggttctaccaataagcactcggttatttccgattcacatccacggcccacgaagtcccgggaattggccgtcagatgatactggtgtcattttccaaaacccgacgttgccaaccctggcttctattcgtcagagtgtcgttcatggcggtcacggcgtaccggtacccgtactttagctcaccagtacttctctcgcccacttaagagtcgacaattcaatttaacctccttttttgcgaactcacctgattggttaaatatacggtttcagccatatcattgggtacaaagtttgattagagtacaagctcacgatattgcttagaaaaacctcaaaatctagacgaataccacaccttccgcacgcgttctacaacggcgaactggacaatactgtattgacagctaactaagctttccaatgatagcattttggtataatatcgccaaaaaatatagccatttcgcaaaaaaatctaatcttacccaaaatcgggcttacgaaatttgttctgtttcccataatcctgcttttttgagcagccaatagtataacgcgaaaaccccaaatcccagctttcttttgagctaatatttgtctccgacagattgtttttgatttttttagagcggaaaaatagaaatgtcgatttttaggtgggccagagaagtatgtttttggtttctgacggggtttgtgtgtttggtgttgttcagtttagtttgtcgtctatctgccttgattggcgatctttgcttacatgttagctaccaagttcccgtcccgaatatctggtccatgcaaaaatggtttttgcacggacctaaacatatttttttaagcacagtctcctttttgtttttagcagtgttgcaagtgtttcacgactgtgggccacaactattagggctccgcgaaggctgggataggagaattttggtataaaccccttctttttattttttattatatttttcttattagctacggtcatctctggcgcctgctttgcagccgcagcatctgcccggaaatttgccagctcaaactgtccaccggcaatgctttacttcgaaacttggttgatatctgtttatagcttatagaaatatccaattgcttacctttagtctttacttcatttcgttcatacgtatccagacatataccgattcatactagtgttgtcggtactgcaatatttggcacccctccctaaagcagttttgaaaggttccaaattttgcagtactggtcgaaacgtaagctgtaaagatggctgtcgaagtaaacaagcgtgctaagaagctgactgttggtggtagtggtcgcatctcctcctcatcatgtgtagaggaaaaactccgaggctggatcaaaggcgagcggcgcgaagagaggcctatactgtctacgttctggctgtacctcagtggcccaccccttgacgacgtcaatggggtgggcgtcatgtcgccgtttaaaaggtagactccaaagccgctttgcagcgctctatttgcgccagcaccacctcagcaagcttagcaacaccggtacgacatttttcagcgctcgatgcacgctctagggactaccacagctgtgaatatgcaagttcgtttgcggagaccggtccgttctttccttttgggcctgcgccaagcgcttccccgcgagctcttctcctgttcttgtacgaaacgccctcgatgctaatgaggtcgtttttgcttgttgctcacaggccggtctcagccacagaagtaattatgtaagcacataattagtgtgatccacattgttacaaaacacggttgaaaatacttgaaatgcacgctgattggtcagcccttaatacaggcgaggtcacccgtgccaaatctatcagacttttgcgttagtgcaccggttcagcctgcccacgcatataaacctcgtatcagagtcgtaccggttaatttgtattagactttagcattattctatcttggtagctgcgcgccgaacaccctccgcgctttagtagatagattaaatatcgctgcacaagccacttgcatattaactagaacaccgagcattctgctatcggcaaagaccctctcggaggagtcctccttcatccaaacatttcagagctggcaccgctgtacttaacatttacccttaatctctggaaacgaatatcctactcaactagtttggcactccatcgaaaaaaacctctacttttccgtgaaaccacgcgatttctgaaattattaacttactttacttgatttcagtatacttttacttcatgtgcgccacatatcaggtgcattgaattaatcctggttgggctgtccatacttcgtaaccgaagcactaccaggataatactttggcatatcagttgttttaccatttgaggatctacgccagtattggtaatttcaaaagcagacagccatcatttgatgtcatcccgttgtcaagaaagccccgaactatatggacttgccgcagttcgcagcacaaatgcaagtataccggtagatggaatagaagcttgcttacacgcaattatgccaaaaaaaatctcccttggtgtgccacccagctggctcaagcgcactaaacaacagggtctagtggcggtggaaaaagcgtcgcattagcagcaaggaaggtatgcaacatgcgttgcgtaataccgcatcgactaccccacacattgcacgcatataacgtcaattagttcacacctagtatgatgcgtagctatgagattaataggtgtgtaggaccattggcaggttgcctcagcaccacagtaagtttgatttttgccaaaagctcattcaaagaaagccctcctctctcatcatcgacgctgtcttggtccttctcgacacgacgaagcgtccgtccgtccgccagccgcgtcgctttattcggtggcagcaggagacgcatcgttcttgatcacagcgttggggcccttagccgaagaaagcaacgcaccactggcgtggacagtcaccgcaatgaccagcgcgaacatgaaagcgaggcgcatactgacagttgggtcttgaggacgcagcggagaaagtaggtcgagggagtgtttggtttttgcttgtggggttgcagagcaaattgcggaatgaagtgtgcgagagcttctgttttgcggagcttggacgtcaggcagggcgtgtatcgcgtacgcacgtacgcacacagtggactacatggaacggtgggctacatacgatagataaatattgcggtcgctcgcgaagatgctttgtccatgccagtagtgatattcagatcctaataacgttttgcttatgcaggtattatatatggttgcggattagttccgcgtactaaacggattaaccccacgtagtttgctgaaacgttaattccgcgtatattatcaggtggtatgtctcaaaaaatcacatcgaggatttgttggcagtgcaagcttgttggctgggttcgtgaaggactactttggtacaacatgcactttggacgctgttattaggcagggtgaagcgagagccgatgtagcttaatgtaccatgatgcctgtcaccaacggtgcagcttccgtcagcttcggtttggtaatgtaagttgcttactgttcaattgtgactgctgatgtggtgactggccacacaacaggtacgacctgagatgcacaggcatctacctctactcccgcatcggtcgtacgtctcacctctataatgccaccgtatgggtcgcagacactcggctagccaatagctaaacactggaggtcgctattggcgaaggttttacatataaggtcagggagccattggagaggctcaaaactgctctcaccacttcatccgttttatttttgcttagccgtaggggctagcgaaggcattgttatagaaacagagaggggcaccaacctcccagatgagccctacgcgcaggtaatctctgtataaaacgctacgtgctggtaacccgaatgaatgatacactcgggagtaatcccttttctacgtggttttaatcctccctcattatatataatcaggcctccctaattgggggaaatgcaggatttcccccaattagattaatagggggacgacttaaggatttaaaatgggtgtggtgggggacgatagtgaaagtaagataatatcttagggattggcatagccggtgctaatttggattcaacctacgatattcaaagtgttacggttcatccgcatccgaattagctagaaacgaatggtcagcgaaagaattatatatcactaatcgtgataaaagttttgactagctctgtaactttgcttgatcggtagatatcatgtcgcgagtgccctggatgggacggtcaagcgttgtatggaagctagaacggttaggcagtggcacaaatagcgagaaacagagctaatatgcaaaagcaatcaacttgttctctccagtgcagattcacggctgaccctacttccttaccgcgcacggagcctgacagctcgtgcttccttcttctttcggctctctgtcggctcacgtgccgacttcaacacgtcaccggctcacctggctctcgtcccaccccttcgtccttggctcacctcacagctcacgtcccgagccacgcggtgctcgtgacctccgtcctgcccttcgcgtcactgctcacctatcgctcgcgtccctgcttccatcgcagccgagcgcgccacctaaccgacgcgtcgccagtcagcgcccctccgaaatggatgactgcccgctcaccgcatcgtctaacagctgatcctccagaagtcgatcgctggccgaacggtcgtccgtgtagtaggaactgtggtgaccgttcctactcggtacgtcctccccgactgaaactcgacgtcctcgtcgtgcagcttccagcttgtcggcttgcatcttggcacgcagctctcgctgttcggcgcgcaacccactgagcgtcctcacgggtttcttatcgcctacgtagccgtccgcacgccacaactcttcgctcaagcgctcagctcttccaagtcttgctgcaattgcgggtagcggtcctcggccatcttcaagggcgcacgcccacccgaagtcgcctcataccatttcagcaagtggctggctacacaggtcgccaccacatagcaactccaccgcactaccgtctcgtcgggcacgagtccgtcaccgatggctagacctccatcagccaacatatagttcagcgtcaacaggagcactgcgacgcccaccgttccttggcacactcgctccacgaagtcgtacacgaacactaccgtgtagaagagggcgtgagccagcagcgacacgaacgcccagaacccacgacacacacagctcgcacggtcgaccgtccgtctgcactctgccttggatcctttccagtacttggccgtcaacttgcagctgagctctaatacgtcaggcaaggagacgcaccacaacgcgtgatacgcttccaaccacttgtgtagcagcctgccgaggccttcggtgtactctccacgagcctcgaacacgatcattgtaacagggttacacgcacaagtggctacagtcacttgtaactctaacagacatgacgtctgttagaggtttgaaagactttctcgactttggtgtagacacaccaaaggctacatacattaacgatcaccacgacgggtggtccatagagacttaggattcctattggttgagagcagcatcttttagccaatgagtgacatgcatagcattggaattctgccaaccagccgttggcagattcctatcttagaatattacatttagaggaagtcagaaacataaaacaaaaatagcagttctcattttaacccaaaaacattatttggttcgtttatttagattaatctatactcggaggcccgagtataaataactctaatttaaactaggctacgcttcctcacatacacgcgcacacgtgtaagctaaagtagtgggccaaagtaggcccattacacctggtagcactttgtagtccgtccaacgaccgactacctgagttcgtacgtcaccgcacgaacgcggagctgagaaccttcccatggatacggaggtgtccagggaaagctccactacccctgcaactcaagttgcacgcgctgactgtccccacctgtcggacccagagtgggaagctctccaacgactgtcaacagtcattggagaggcggctgtagctacgatgctgcgtacgctaacgccgacagagcaacacagtgttgctctgggattcatcctgaaggagcaacgcgatgttgctgctactaccgcggtgtcgtccgggacgacaccacgctcaatcgctgaagctcaatgtgagcaactatgtcggaagagagggtgaacctctcctccgttgggttgtcgaactagacactgccattgcggctcgacgtatcatcgacccgttgtcgaaggttgcgtacgccatgtcatgccttggcggacgtgcaagaagttgggcgtatggacgccgactctcgggtcctacgtgctttagcacgtacgagggtttcaaggaggagctcagacaagcatttgagcccccgcaaaatgagttccggtcgagggcggagttcctcgacctgcagcagggcaagcatgatgtccatgcttacgctcagagagcacggtacttggtctcgaacattgtgaccaatccgatcgacgaggcgaccaaggtcgtcacgttcatgaagggactgagagatgggcctgtgaagatctatctctttcgtgagtacccgagtactctcgaagctgcaattactcttgcaatgcaggaggagtttagcctgcggcaggctaagcagcatgcacatgtgccgaggccacagccacgcccggtagtgaggacgggaggcccagaacccatggacctctcgagtgctgcaactgctggatcccagcagtcgcagggaaacaatgtgcgatgctaccgttgtggtagagtcggtctctttgctcgggagtgcacgtccgtgcaccagcagggtggctatcgcggcggtgccgggcaccgtcgcaaccaaacaaaaaacactggacgccagtaggcgcggggcgccctactggtatcgcagttccgcgtatcgacctttgacacgcgacactgaggactgcagcccccagtgagactcattatcactgcaagaaccaagatgacaagcctgaccttgtcatcctgaatgtggactcgatgagagcaagtggctctctccgtgctttggtagattctggcgcgtcgaagaactttgttcgactgcgaagtctatcaaggcttgacttcgaggatttaaagatacctcgaagtatgttggaagtacgactagcaacgggtgccgtcgtgaagaccgagaagcgcatggtacgcgtgcgcttcacgtatgaagatcaagagtttgtcgagacctttatcgtcctgggtctggacgatgagtttgacattgtattgggcatgccgtggcttgcacggcatgatccggtcatcgattgggagaagcgcactctcgtgcgcttcggtcgcgacagcggaacagtgagcgatggccctgttgccgctacgcacgcaccgacaggtgtgcgcgactccccactcgagacagcgcctaatgccactgtcccggagcgccctgggcgcgcgcgagcacgcgcgcaagagcagctagcgtcggtgttgccgccaacagctaatgaaggaaatgtgttgacctcggaggtcgacacccgcttttcagcgaatcaggaaaagtctccggcttcaaggggcacggatgacgcaggcgagtcacacgcctcagccgtggaggctgacgcgaatttgattggatcagttttggccaatcataagagccaaggtgacgaaacgccgtcgactccgggagtcgacggcttgcgtgaatttgattcgtcggctcggggagccgacgcaccctccgtattgggggtctccgccaacggttggcgtcgaggtattgaagtcgcatcgactccaggagtcgatagcttggacgaatttgattcgtcggctcggggagccgatgcaccctccgaactgaggcagttcttcatggagaccaccactgagagcgaggacactctcagtgcgaaaacgaagaaggagcgctttgaagagcagagctgggactcgttgaagacgagtccctactacgagatcttacgggagtgtgcggacgtactaccggaagagattactgcggagcttccgcaggacaagggcatccagcacgaaattgatctcgtgccggggacgaagtactgtgtcacgcggcagtggctactgccgcgagagcaggtcaaggcgatcgacgacttctttgagagtcatcgcaaagctgacaagtgcgggaatcgaaatccccgcacagtgctccgacgttctgtgtcaagaagccacagggtggttggcgcatcgttcatgcgtacaacaagctgaacgatgcgacgataccggcgcagacaccgataccgcgaaaagatgtcatcatcgattcgatggccaggagcactatctacagtgctcttgatctgcgcgaagggttctatcagatcctcatgcgagagagcgatatccctctcacggctgtgagcacgcccagcggcatgctctgggagtggctagtgataccgcagggtctgaagagcgcccctgcgaccttcaacaggtgcgtgacgcacttgttgcgctcggtgcgcgacttcgcaccgagctacttcgacgatgtgttcgtccacagccgggctgcggacgggatgagcgatgttgagatgcacaaggtgcatctccggaagctgcttgcgctcacgcccaagcacaagctctatgcgaacctgaagaagtacatcttcggggcgagcgagacacccgtgctcgggtgtctcgtcgggaagaacggtgtccgccctgaccctgagaaggtcagagtgatcaatgagtggccgacgccgtcgaacgtcaaggaactgcggcagttccttggcttggtcacgtacttgtgcaagtacgtgaaggactacgcgggcatgatacgcccgctgtgacagctcccgaagaaggacgccgagtgggtttggactgctgagtgtcagcaggccttcgatgcagtcaagcggggcttgactgaggcgccgatcttggcggtggccgaccaagatcgcccattccacgttgtgtgtgacgcatccgacttcgcaatcggatgtgcgttgatgcagcacgatcacgagggccgtgatcgtgtcgtctactaccaatcgcgtcagctgaagccagctgagcgcaactacccagtacatgacaaggacctccttgccatgaagtacgcactcgcgaagttccgagtgtatctacttggaagcaaaccattcgtggtctatacggaccacgtgtcactgcggacggctgtgaagtcgccgcaaatctcgcaacggatggcgagatggctctcattcttcgcagagtataacttccgggttgagtacaaacccggaagactcaatgtggtggccgacgcgctctcgcgtcgacctgactacaccacgactgatgccgacgtcaatgccattgacgccatgcgatcgagcaccccgacgtcgtcactgttggacgacgtgaaggtcgcgtacgcgcacgacgcggacgcgaagctcttgctggcctacggctcagcgccttatggccaagctcgtcagtttacacttcttgggagtcaactttcgatgtcgactgcggaccatccgcagacggacgggcagaccgagcgcgtgaaccgcgtgctcgtagacgtgcttaagagctacactcactcgttccaacactggagcgagtgcctgccgatggcggagttcgccatcaacaactcggtgtatgcctcgaccgggcatacaccgttctacgtgaatgccatcaggcacccacgcctcccgagtctactcgggatggtggctccttccttaagtgggggaggatctacgactgcaacgcagcagccgcagaatgccgctgacacttgcacagtgtcagccgcgactacgcgcaacaagaagaagaagcacgcgtctgtgcaggtcacagacgtcgacaagagcaacaacaagaagaagaacgggtctgtgcagggcacagacaccgcgaagacgaacgcagaggccggacctactgctagaaacgagctgaacgagttcagctcggactcaatcaacttcgtgcagcgcagacaagccatcattcggtttggccaagacgctatcgcagcttctgtcggtcgacagaagctgaacgcagacaatgttggtaagggcaacactaatgaattcaagaagggtacattggttttgttagcaactcaaaacctgcctaaacattccgtttccgacgtcggggcgagcaagctcgctccgtgcttcatcgggccgttcacggtgttggcacggcatggcaacacctacacgctagatattccatctagcatgcgcctccatccgaccttttacgtcgggcggctgaagccataccggcagcacgaaccacctagctcgtctggcccgaagcggaagccccagcgggagtgaacctctgctccagcgcgtgaacgcgctgggccaagcgtgcgacgcgacctcccacgtcgacagagatgtccgacgcggtctgcgaggcctgagcgacttgagccctcaggaacgccacctcctgcttcagagcggcgaactcccggctctgatgctgttccacagcagcgacccgctcctcgagcgtcgggccaaggtcaaccccaggttgaccatacccggggcgtgttcccaccaccgccgcctccgatccgcgacgcccgcagctcaacacgctggattgttgagcgtattgtgaaccatagtaccccgaaaacgaaccgtcagccggttcgttatcgtattcgttggagagggtttccgccccaccaagatacatgggagccacgggacgtcctgctgcaggacgttccggaaatggtgagggcgtacgaagctcaccacgcactgccgacgcgaaggtagtgcgagcgctgtggtcacctacagcgcccgagatcccacgatcgtcgcgttcctcgcgtgccaggaatttggtacgaagatccttgagactctcaggtacacgaatcgtcgtgtacccgtttaggtcgcggtcgctcaagcgcaccgcacctggaagacacaacgtgcactgatggccttcgggcacagcgcatggaataccagcgtccacagaggatctgtggagctgctccagcctcccgcgcgtcgagaatgtctcgaagcgctcacgggcgtacttaacccgctcacggtaagcagccggcttcttgttgaagttctcaacaaaagcattccaactttgacaaagtgcctgccactcaggcactttgctgtgagaagaggtcttcttgctggagaagtatcggagttcgtgaaatagtccgatatagtaatcgcgcctttgattcgttaacggatcaaattgctgctcctccgccacagcatcatcgtggatcccgctgcatacgtacagcggaatttcatttggaggcacggtgttgcccacacggtctgcgatctctgacgcaaacggcatccacggatcgcgcgctgcctgagcagcgcgcggagaacttgaagacgccacctcacgcggggagcttaaagccccagcagcggagagcggagtttcgctctcgccgcgcgaacgcttcgagcttgaagcgtccgaatcgtctccttcacgagggcgtctcgacccggcatgcgggtcgagactatcactgtcgatagactccttgcgcttgttggaagaggcctcgccctcttccatctctacgtcgtcactcccatagtcaacggcgtcgttgactacagaggaaccttcgaggacaatctccgactgagttgtccccaacgcggcctttgcagcgagcgcgtcgcactttgcctgctggcgctcatggtactgagcaacagaggttaccatctgttccggcggcggtcttcttctgcggcgagctcattgcggaatgagctcgagttttctttctgccaacgtgaagaattgacgaatggtcaatgtcctgattgacgtgccgtcactcggcgcgtctaaccttgaggggggttggtgtagcagggttacacgcacaagtggctacagtcacttgtaactctagcagacatgacgtctgttagaagttcgaaagactttctcgactttggtgtagacacaccaaaggctacatacatttacgatcaccacgacgggtggtccatagagacttaggattcctattggttgagagcagcgtcttttagccaatgagtgacatgcatagcattggaattctgccaaccagccgttggcagattcctatcttagaatattacatttagaggaagtcagaaacataaaacaaaaatagcagttctcattttaacccaaaaacattatttggttcgtttatttagattaatctatactcggaggcccgagtataaataactctattttaaactaggctacgcttcctcacatacacgcgcacacgtgtaagctaaagtagtgggccaaagtaggcccattacaatcatgggcgtggcccaaattgcttcgagtcctttccatctccgttccgcagccggtcgactttgcacggccggaccgttcacaaagcgacggtagctcctcagacacacccgcgccagcgtagaccacttgtagacgaaggcgatgactgcgccgagcagtcgacccgcgatactccacagcggcctcgtcaccactccgccaatcgcgccaacgaccaacaaaacggtcacccaccaatatttgcacagcaccgtgagcgcgacgcgccacagccctaacgaactccaaaagcacccctcgatcacttcaagagtcgtttccacctcgccaccgtgcgaaagataaaatgcagtcattagagctgcatgagtccaccgttcctgcttacttgcgagggctgcagccgtcgcactcaccacttcggtagatccagcaaccaaccgttgcatttcgtcaattcaccgtgtttgacacgaccgtgtcactcgtcaaccgcgtctctcccttccctgaaaggaaatcacagaccttcaacttccaacggtcgagtcgttgtccatcagtaacgcccgctcattggcttcttgtcctcatttcagctttcgccgagacaagagcaagccacccaagaaccccaccaccatggccaagtctcgcgacgagaacaaggccgccatcatccgacgactgcgctcgcgcttggaccgcaagacgcgcggcgcgaacgccgaggccgacgcgcgactgcggcgcaagtcgacttctacgcccagctgcgcagctccatcttcgtcaacggcgactcgctcggcgtcacggccctggacgatgtggccgtggccacgctggccgacgacacgcagttgcccgcagagctcgtgcgcacggtggtgctgttgccagcggccactacgatggacacggagccctcgcctgcgcatgacctcttcgctgctcatgctgtccctgcgcccacgaccaagcgcccggccccttcgagcgctaacgaccagaaggcccccgccgccaagaagcagcgcaagagctcgcgcaccccacagtacatgttcgacttgccggacacctgcccccgcgaagttcagcgagacgtggagaagctggtcaaggccgccgccaagcagggcaagaccccgccgcgcgccgcctacccctgggccggtcagcgtccctggtacgacccggaagagtttccggagctctacctgatgaactggcgctactacatgcgccaccgtgacacgttcttcgactgtgcgttgtacgcaccaacggacaactcggacgctcgccgccgcgacaagctcaacgcgaaccaaggccgcctcgtgctggtgagtgcgaacgtctgtctcttcggctggtacggcttcctcgaccgcttcgagaacaccgttcacgacaacctcatgtggctcggaggcaaggccgccaagcgttccgtgtcggccaagggcaaggccagctcggcgacggacctcggcacgctgtggcgccacgaccgttcccgctacgacagcctgatgggtcgtatcctggatccgtgccgcgtcgacgaagacggttaccagagcatccgtgggctgctggagcagacggaggctttggacccgactcgtctcccgcaccttcgactcagtgacgaagctctggtttgcatcgcggtcgatgcgggccgcaaacctcccaacccggcctggatcggcaacaagagcagcggcatctggaagacgctgctgacgaacagccagatccgcgcgctccaggtcaagatcgccaagcagctcaaggagggcacgtaccgggtcgccatggacttgaagccgatccagcgcaaggagcagagtgacaacgactcggactcttcgagctccaagtagttctccgtgaatcagggacgctcctggccgttcattctttccgtattgctccatgcgtccctccaattaatctcaacaacaatatgcaaaccgttttccactcgttccgttctcgattcttgtagttcgaccgttcataacatcactccacgaccgtttctctaaaacacaaacgctcccaccgttgaccgcgctacgccattagcaggtcatcatcctccacttcttcgatggcatcggccagccgcgagcttcgatgcaactcgggcagccgcaacttcttccgctgggcttgttcaaaagccgtcactagggcctcatactcaggcatcaactctgcccgaggcacccaaaacatttcataattcgcaaccaacgccaggtactccacagaacggtccaccgttcgtttcccacacactgctaacaacggtgagtcgacaccagtgaggaccgtgtctcccttgccaacggtcagccgttccgtgaaacgcgacgccgggagatcggactcctctagaggtcctgcctccgcgtctccttcaccgttttcgactccgtctggtacgtcatccatgtacggccgagtccacttgccacgaaacttcttcaaacggttcacgttgaccgtgaccaccttgtcaggatgcgacgagatgtcaatccggtacgcattatcgcccactttcgctacaactcggtaaggaccgtgccatgcgaacgctagcttcttcgtctgagcctcccctcgcttcttccggaacagttgatacacccacaccgggtccccagcctcgtactccacggctacacggtcacctaatcgtttttcatgacgatcttgagccttcaccagttgaccctaagacgagaatcccgcagcgaccggtataactcccgtcgatacagagccactccgttgcacctccacttcttccccaggttcaggaacgcgacgtccagcggtggcgtagcatcacgtctgtagagagaaaagaacggtgtatcgcctaacgcctcatggtaagacgtacggtaggcaaacaacactcgaggcaaatacagatcccagtccgtttgcgcttcactcacgtgcatcgtgagcattcccatgagcgtttcgttgaaccgttccacgagaccttaagtctgcgggtgataggcagaaccgaacagcttcttgataccgagcgtttgatagaacgacttagcgatttctgacgtgaaattccgaccgttgtcactcaacaaccgtgaaggcacaccgtgccgggacacaacaccgttcaccatgacgtcaacgaacgcgacggagtccaatcggagaactgcgaaggcttcggcccatctcgtgaagtattccacgaatacaagaatgtacttgttgcctcgttcagtctccggtaacggtccgacggcatcgaccactagtagcgagagcggtcccgtgagatcggctacgggcatccggtgcatcagccccgcttgccacggtctcgagtccttcccactatcacaacggttacactcccggacgtactccgtgacatccgttcgccatcccggccagaacgcatgtctcctcaccttctccagagtcttcgtcaatcccaagtgagatgacagaacgtcagcgtgacagtagtgcaacacggtctccacatacggtaacggaaccaccggaacggtcaaggaccgtgcaggtccgacccgagctgacgccgcatcaataaaccgttccgcacttcatatcgacgttccatcttgacgacagtcgctcgcaggaaggggtcgagaggcaaggcaccgttcagcagcaaagccaccagagccttgatccacggcaccgcttgctgcgcttctacgaactgttcagagtcgagtccgaaccggcccacagtggatatcggcacatccgttaccggaccgctgccaacgtcctcgtttggacggtcaggttcgtcatcatccacatgttcatctgcacgctcgccagcaacatcctcacagttcttaagttcacggtttgtaccaggctgctccccgactgaagccggaagcacgtcatcgaccgtgctctcaggattcaggaggtcgctcatcgtcagagccgccactgtgtccatcggcaatcgcgacagaccgtcaacatgacccaaagaagcaccaggcttgtgatgaactttgaactggaggctcgagagctccatcgccccgtgcaagcttagcgttcgtcgtacggttaccgaggctgaacacccacgtcagcgcctggtggtccttgtacaaatcgaactcacgcttgtccaggtagcagcggtactttctcgtcgcccagacaactccccaacattcaatctccgagatgccatcttggttgttgatccagttcttctgcgacccagccaacagcttactagcgtaggccactacacggtcgcgaccgttcacttcttgcatcaagcaagcgccaacagcgtaccgtgacgagtccacgtacaacttaaaccgtttcttgccattaggatagactagtatcggcggcttcaagagtgcacgcttcaactgtctaaacgcagcttcacattcctcgttccacacacggtgcggccttcaccttcagccgttccaggggcgcagagatagacgcataccccgggatgtagcgacggaagtaactcgtcagacccaggaaagagtggatcccatgcacgtccactggacgcttcacgtccatcacgcccttcaccttctcgggattaggcaggatcccagtaggagtcacgatgtgccccaggaacgctacttgactgcgcccccagtgacacttcttcatcttgagcttgaatccagcctgctggaaccgagtcagcacttggcgcacacggaccagatgggaagggaagtccttgctaaaaatcacacagacgtcgagatagaccaggcagatacgccattttagatacactaacacggtctccatgaaacgctcgaacgcggggacagcgttacagagtccaaatggcatcactagccactcgtacagaccgtacttgcatgtgaatgccgtcttggacgcgttgtccggatgcatgggcacggtccagtagccagaagcgatatcaatcgtcgaaaacagttgagcgtcgcacaacacgtccagaatatcatcaatcaacggcatggggtaaccgtccttcaccgttaccgcgttcaacttatggtagttgatgcagaaccgtattccacctccggtttccgaatcatcaggaccgggctcgcccacggactgttcgagggtcgaatcaggttcagctccaagtactgctggatctccgcttccatgacttcaccttcagctaacaagacacggtacggctgctgcttgatcggagcactgtcagcggtgtcgatctcgaactgcaacagatccgtccgtccgggcttcttagaagagtccacaaacatgctgtggaaaccgttcagttctccttggaacaattccttgccacacaacgggggaacatccaccgttcctccttcaccgttcagcacttcttcacgaccgttgtttcgacctccgtagtacacgcttccttcagcaaccggaacacagcttgacgcgcgatcgctctcttgatcttcgaatcgacgcgttgtactccacttaggacaggaatcccttcctccaccgagaccgttcctcccggatcatcgggagggcgcaagacattctcgcacacgaaagattcgacgaccgtgttaaccacgcttgtgaccgtttcatcatcagaatccgaccgttcggaggagacatcagagctgcgggtatcgttgtcgacgcctgaccgcgccgaggtcttccccaccgttccacttgacgcagcttgttcaccatagacgacattcgccaccggagtccggaagtctcggttcgcacgcttggcttcctccgacttctccagcatatcaccgtacgaatctggccagtactcaggcgtcccaaaggagtcggatcctgggctgcaccacggagtgccacaatgccaggacacgcaccgataaggtgaccttcttcctcgcaacgcgcacttggtaacgccacgaccaccgttccggccaaccgtttcagggccgcgttggtagttgttgggtcccgcttcacactccacagcgatatgaccgtgaacgccacaagtgtggcacgtcatggactggcggcgacaggtctctcgtgagtgacccacgtagccacaccggccacacacaggcgctccctcttgcgttcgactgtcagctcccatacggattgctcggaccggtcgaccgttcccacgaggtccatgaccgttcactccgtcgccaggattcgaagtcggttctgcatcatctgctgctgccactgctgctgctgcgccatgaacgtcgtcatcttctccgcaaccacgtgtcccgagtgggaacggttgtcaccgtctcgggtacggtcgcggccgtcctccggcagcctgtcaatcagcgcgtggactactactcgaggatcagctgttcgaggatcagctgactgagcagtcatcggacattagcgaggattacctggcggcgggccatttccgtggacgaagagtcgtgatggaagcagtggcgtgttccgcgcgtaggcggtgacgtgaggagataggatggaggtcacgagcgctgcgtggctcggggcgtgagccttgatgcgagccaagggcgaaggggtgaaaggaggtgaccatggggtcgggggcggcggtgtgtcgacgctcaagttgaagagaagcaagagagagcgcggggcgaagtgctccgtgccgggtaggttggtcagtcgtgaatttgccgtggaaacaacaagttgaatctttgcatttgactctgttgtatttcctaccgttccttacctgtccgtaccgtcctacttcattttcgcagcggcagccatcccttccagggcgactcgcgacacgtggtggaaaagcagggtaccggcttcgctgtgatgtgggggtcggacagtctggacacgtcgggcggcgagagtcgttggcctttgcgaggtgacagcagcgtgttggaatcgcgatcgagagctcgtccctggggtcttcaaggagtctcggcatccgcgtaagacttgtggaacggtcttgtctggaagtgaagtgaagaacggcacgctcggtgcctctggaattggtctacggctctctcggaacccgtgtaattagtcgctggctcgctcggagcccctgtaattggtctacggctcgctcggagcccctgaggtttgaaggttggagtttacagtttggagaagatgtctggagttggagaaggtgaggggtccgcggagcagcggaccgtgcaagaagaagtggcgcgcctggaggctgaacggcttcgcaaggcgagggggactggtgggacgtcagcgacgccgacgtcgcccggtgacgggagcgggacgagcacgacggccaaggtgacgagtgcggccggtcgtaaataactgcgccaagagatgatgggagatctctgggctgatgaagaagaaggtgagtttacggacgctgatgaggagcgtgaaggagacggtgcccccgcggagctagagcccgaggagaaggaggcggtgcccggccccggagagctacggaacgatgacgccgaagagtcgagaggcgcgttctcgaggcccgtgcactactggtcgagtggtttcggctacgacgatcctgtgccgatcgagacggcgcattcgcggccgttctacaggtcctacgtgaaggaaaaagctgaggaagtgccctctcgtagcccgagcgggttcattccggggttatccgggacggagagacggttgccgaacccgtcctcgtacggttggagtgttggggcgcagcctggcgcctacggtgggtggagcacggtgagccgaaagtcaaacagctagtcaaggcagagccgagcaagacggtgactccttgccaagactccgaccccgggcgcggcgccggcggccaagaaacagtcgaccccagtgaacctcggtggaccaaaccgcgtatcgactatgtggtccccggctcgcagcgcgtacgacatgtcatcaatggtgtccaacgtgatgaaggtgttgccggtgttctactcggacacggcgacgatggagaaggctcgtgacttctgggagctgttcgaagctcacacggcccacctgcctgatcagtcgcgattgctggtgtttcaccagaaactcaaaggcagtcctgcggaacggtggtggaacaattttaccattaagactttcgctacgctaaaagtacggttccataaccaattcctgagcagaacggctgatgagctgtgggaacggctacagactacgaagcatgaacgcggtgagtccgtggaggagtggggcgatcgcgtctccgacctctgcgactcgctggactatccgaacccgcagatgaggtagggtaattcccaaaatacggagtgctggggaaacttttgacattttcaaccttttgcgaccaaacacggagttgtgggaaaacatattcccaagaccagcctgtagaatcgtagaggtagccttcactgtagaaaacaccagagactcaagagcccacgtgctggtgcacgccgctccggacgcgccgctggagaagacgctggcagtcgccgccatcatggacggcacaccctccggtgccttgctgtccacgaccgtgctgctgcagtaggagggcgtggtgcgctcgaacctcggccctgacactgacaccagggactcgctggactcgccaaccgtggcctccctgggcgagctactggtcaccaatggcacgctgcgcccgacgactgtgagcgagctgctggccaccagcgcccgacgaccgtgggcgagctgctgatctcgctggactcgccgaccgtggcctccctgggcgagctgctggccactaagacgcaggtggctacaggagacaaagggcgtggtgaagacgacttccgtggccattgtaggcacgctggacaccgaaggcgagctgctggagaccaaggacgtgctggacccgaagcccatggcccccgtggacgaccaacggcgcggtcaagctgctgtacatcaagcgcgtgaagcgcgggtcgcccgtggccgcgctggggtacctcgagggcacaacggtgcgtgtaggtaaatatagcaattccatttctagaaatgtccagtgttcaagtcgctttgccattgttttcaaaagcaaaaatggtgaaatcatctgagggtagctcgggttgttttcccggcgatggaaggttttgacggtgtaaacagtgcaggtgatacatctttcatatcggtcggccagtggtttggttctcaacgtgcttgtgccaaggcaattaagtcttttgcctcaagtacagggaaatctgtgcgtctggatccaactgctgctggaggagcctaacttcgctaccagtgcaaaggaggtgacctctgtcgttttgaggttgctgcgtgccgtgcacagtccaattctcagcggggttatcgcattagcaaatgcaaccttgaacacaacatgtgcagcggccggtctaaaattgcggcatcgcaactgcgatctatggaatcgattcgtacatcggtggcatcggaccctaatgtgtcggggcgcacgattgtggatcaggtgaaggccctatcgggcgcggacatacctttgaaggaggcctaccgtggcaagcagttgattcttgacgatctgtttgggactgtggagaacggatttcaccgcctacgttctctgctgtctacgtgtccctcttagaaagctaacatttttttcagacagaggtactggcattcttgcagcgttccacactcttggatacaaaaacgttcgcttctgcaccagacatattctacagaatataaacaagatgttcaagggtcagtgccccgttgatatggccaaggtactttacggactgcaagcagcttctagccctgaagtatacaagtcacgccttgactgtttaagactgacacagcccaacattgcagactacatcgaaggcattgaccccagcaagtgggttttgtacccagctctcaggtcaaaccgactgtacggatggcgtacaacaaactttgtcgaatcgcagaatgcggcttccctggcacctcgcctcctgttgccctttgggtttttctcgttctttatgaagcaaattatggatagcgagtacaaacaccaacaactagccgcagagtggataaaaaaggaggcgagcttgacccacagagcacacaccaaaattaagaagcaacaagagctttaagtctactacaaagtccgaccatccgatggtgacgtgggttttgtggagaacctccgtggctatcctgcgcgaacacggcgagttaatattactgctcgatcttgcagttgcaacgactacgaccaacagggaattccttgtcgccactacatagcggctttgcatcatttcaaccgctcttccgaaatgtttgacgtagtagatgactgcttcaaactcgattccttccaggtgctacatggatctaacgcgcgaagccccatcgaacttgtgctggacgaagaactagccgttaacaaggacgatctgcccccgaaactgaatcagaatcctggtcgcaacaagcagcgacagtatcctagcagtggagatacgacgcagagtgttggcagggcgaagcgaaaaatgacctgcaccaagtgtaaccggcaaggacacatgcggtaagtaggcgtaggccgtgcgaggaatacaaacaattcgagttctcggataatatattgcatatcaattagccgtcataatgcatctcgaactacacccaactactcatgtgcagtggcgactcggccgtgccctcgatgtaccacagctcggccacgggcgtcccgcgcttcacacgcttgatgaacagcaggttgaccgtgctcttggtcttcggtagctcgtccacgagggccatgggcttcgggtccagcacgtccttggtctccagcagctcgccttcggtgtccagcgcgcctacaatggccatggaagtcgtcttcaccacgccctttgtctcctgtagctacaagcgtcttggtggccagcagctcgcccagggaggccacggtcggcgagtccagcgagatcagcagctcgcccacggtcgtcgggcgctggtggccagcagctcgctcacagtcgtcgggcgcagcgagccattggtgaccagtagctcgcccagggaggccacggttggcgagtccagcgagtccctggtgtcagtgtcagggccgaggttcgagcgcaccacgccctcctactgcagcagcacggtcgtggacagcaaggcaccggagggtgtgccgtccatgatggcggcgactgccagcgtcttctccagcggcgcgtccggagcggcgtgcaccagcacgtgggctcttgagtctctggtgttttctacagtgaaggctacctctacgattctacaggctggtcttgggaatatgttttcccacaactccgtgtttggtcgcaaaaggttgaaaatgtcaaaagtttccccagcactctgtattttggggattacccgatgaggtaccagttgttccgatgcgggctgcgcaacaagcgtatgctcgccacgctcgtctcgggcccggcacgagacattcccgaggcttgtgagtggctgctggccaaggaaatgtcccgtcccatagaagaagaagacgatttcctcgaagacaagaagggggcgggctcggcctcgagcctggcgacggcggccgcttccgagacctcgacgaagctgaccaagctcgctgagacgatgacctcgttcatgacccagcagcagcagtggcagcagcagatgatgcggaatcagtggcagccgccgcgctcgccaaggaatcgcatgccgaatgtgtcggccacgacttcgagtccaggctcgggcgggaacgctccacccgggaacggtcggccgcgagggattcgtatgggtgctgattcacggacgcaagaaggagcgcccgtgtgcggacggtgtggctacgtgggccattcacgcgagacttgtcgacaagtgatgatacgcaaccagtgtggagaacttggacacatcgccgtggaatgcgaggacgggcccagtcgcggccggaccggtggtcaggctcccgtggctaggaacagtggccgagggccagtgaagtgcgggttttgcaaggaggacggtcactcgttcgcgggatgccccgaagtggcggcgctccgaggtctggccgtgagtctgcaagaagctgcgcagacttctccgcctcaatgatgagggcggaaggaaggggaggagagagtcactccttcctcttgtctattggatgactcggagggtgaggatcgtgaccgtgacgaagtggaggagacggtctcgaaggtggatgtatgcatgagtgtattggcggagccggacggaacggtatcagccctggatgaagtttcgtatggagaaaacaaggacaaaaacgagaaaaaaagctgaatttattgtggttagtacgggtgatgaggggggggggatctcgcggtgaaggtcggcgacttggaatacgatacggtcaacgagaacttagccatctcggcggctgccgctgacacgaccgtcgcggtgggagggtcgatcgccttggcggccgacgtgaagaccggtggagtagaggaggccgagccgaccgagttgaaggccgagccgaccgtggcgaacgcgcccgagttgccgagcgagaagaaggacccggaagagttgccggaggtaccgtcgccgttcgcggtcgcgccgccgccgtatgggtcgggactggaggaggaggaggatatggaggaggtgccgacgccgttcgccaacgcgccgccgccgtatgccctagatgacaaagggtacgacttgtcggactgcttgttctcggcctggacgaagggagaagacgtacttgcagaggctgctgaggacggtgcggtcccgccggaggcgacaaccgtatctggtaatgaccgtctgttctcggacgatgagctcacggcgatggagaacggtgaaccgggccaggaggcttccatcctcgccggtacggacgtcgtccccgagcccgaagagtatgacaaggagctcgaggaccgactgtacccgctggacgaggtggagctcctgtagcgtgtcgctcgaaatgctgaggcttaagtcgagccgtcgtcggaagagttggctcgcatcctcgggatctcgctggaggtggtggaacggacgcaccaggcgtcctctgacttgcacggttcgcccgagcactggcaaggctggttcgaggacatgctcgacaagtccgaggaggccaagcgtgcgaaccgcgacttccggagccccgtggttagcgtggtctacggctctccgtcggaggctgtcgccgacccgaaggaggcgcctctggctgcctgcgtcgcgagaggtttggagatcgtgtcaccaagtgacgtcgcgagcgtctcggcggagatgcaggtggccgccgagtctgtcgtggccgagaacgtcgtgcgtccgccgggtgatcctagtgggacccttgcggtgaccaaagcggtgcctatcttgagtgaagtgcgaggcgtggacccgaaggtcgcgcgtgcggtggcaaggcaagctgtgttccgcttcctgaaggaggctagaaactatggaggccgggtgcgtgaggtgcggagacctcccgacgacggtgggagtccctccgctgcgggacaaggttcctgagtacgataaagagctgctcctgaagcacgtcgaccgtgtcaaggagttgaggagcgtgacggctcgatctggtgagcgcttatgttcctgaatcaggacctactacgacaacaactctcgaaggatttggttggagctgtggacccgtacggggcggtctaagacgccgagtgctagacgtcgccgtcgccgtcgccccgacaaggcggtcacgtttgatttttcgtcgctttacaagccgtatgccgagttgatcgacgacttggagcttttccctgagcgtgacgagaacgcttcacactacgtcgaggtgatgaggtgtgaacgtcccgctcggacgccactgccgaagactggcctggtggacgttgtctcggtgaacctaccgaatggtttcggagtctatgatgatgaggacgctgaagactgtgtgcaccgtgtcgtggaagacggacgaagggtggtgtgcgcgattggcaactttgaggcacttccaagtggttatattgactgtttaccgtctcaaatgttggccgataccggctctaccttaagtctcgttgaccgttgcgtgctgaagcgactggggcggtcctctgagcctctggacccttacgaagggctggtcaggagctcgtcgggacacaagcttcggatccgcggctggatcagcttgtcgttccggcttgggtcggtggagatttcgctgagcgtgttggtggccgacaagctgcatgtcgacgcgattctgggagttgacgctttaggcgcgttcggcgccgtgattgacgtggcggagcgctccctgacactgaagagctccggcgaggtgctacctccgggctttacgatggtacaagagtcctacatggcggcgatggcgacgtcggtgtggctccctccccgaggacaggctcttgtgagagctcgagtggtgggggacgtggccgataaggccattgtgctggtcaaaggctcgttgggcctgccgcctacgctgtgcgtagcgagaacgctgtgtacggtggaggacggccgagtgatcgtcgaggtgtgcaatgcatccacggacgaatactggattcggaaggggacggtcgttgcgagcacgtccgtgatccccgagtctgcttttgagccggcaacgacggcgccgggtggaacggttcccgctgaaagcgatgattcgggcggggcgagtgcgatgtccgtgccggaaaagcgtgaggagggcgtcggcgagaaggtgaaggcctcgaagcccgacattccgcccgacaagtcggacggcataaaggccgacttctccgagtccaagttgtcctccgagcaaaaggagctcttccagactgagctggacggcttccgctcgatgttcgtggagtcctcgaagaagccgggacgtacggacctgctacagttcgagattgacgccggcagcagcgcgccgatcaagcatgcaccgtaccatgtctcgttggctgaaggagagattatggaggcagagatccaacagtacctggagttgaatttgatccatccttcgaacagtccgtgggcgagccctgtcctgatgattcggaagccggacggtgggatacggttctgcatcaactaccataagttgaacgcggtaacggtgaaggacggttaccccatgccgttgattgatgatattctggacgtgttgtgcgacgctcaactgttttcgacgattgatatcgcttctggctactggaccgtgcccatgcatccggacaacgcgtccaagacggcattcacatgcaagtacggtctgtacgagtggctagtgatgccatttggactctgtaacgctgtccccgcgttcgagcgtttcatggagaccgtgttagtgtatctaaaatggcgtatctgcctggtctatctcgacgtctgtgtgattttcagcaaggacgtctctacgcatctggtgcgtgttcgtcaagtgctgactcgcttccagcaagcgggcttcaagctcaagatgaaaaattgccattggggaagaagtcaagttgcctttttgggtcatattgtcacgcctacgggtatcctacccaatcccgagaaggtaaaagcggtcctgaacgtgaagaggcctgtggacgtgcacggcatactgtcgttccttggattgaccagctacttccgtcgctacatttcggggtacgcttctatttcagcgcccttggaacgctggaaggtcaaggacgctccgttcgagtggagcgaggacggtgtaggtgcttttcgtcaactgaagagggccctaatgaagcctcctatcctagtatatccggacggtaacaagcggttcaagttgtacgttgactcgtcacggtacgcggttggagcgtgcctcatgcaggaagtgggcggtcgtaaccgtgtggtggcgtacgcgagcaagttgttgaccgggtctcagaagaactggatcacgaagcaggacggcatctccgagatcgagtgttgggggggggggtcgtctgggcgaccaggaagttccgatgttatctcgacaagcgtgagttcgacttatacacggatcaccgggcgctgacgtgggtgtttaatcctggcagccgtactacgaacgctaagctggctcggtgggcaatggaactctctaatttgctgtttaaggtgcatcacaagtctggtacctctatggggcgcgtggacggtatatctagactacctatggacacggtggcggctctctcgatgagtgacttgctgaacccggaaggcacggtcgaggacgtgcttccgacttcagtcggggagcaagcgggggccgacgacggtcctggtataggtggcgagcgtgccggtggtcgtgtcgacgacgagtgtcctgaccagcctaatgaagccgtgagtgacactcccgctgggagtgcccctctaactcctgtggaccggttcggtctcgacttcgaccagtatatacaagcgcagcaagaggttccgtgggtgaaggcgctggtggcgtttctgctggacggagccctacccttggatccgttcctccggtctacgattgtgaggatgcggtctcgatacgtggttcggaacggtttactgatgaggaaggtgcacttaccggctcgggtcgggcctgcccggtccctgaccgtcccggtagtgcctgtgccgtatgtggaaaccgttctacactactgtcacgctggcgtactatcctcgcagttgggtctgacaaagacgctcgagaaagtgaggaagcacgctttctggcctggctggaggaaggacgtcacggagtatgtccgcgagtgtacacgatgtggcagtgggaaggggccgagaccgtggcaggccggccagatgcagcgaatgccggtggcggatctctcgggtcctttctcgatgctggtggtggacgccgtgggaccgttacccgtgacggagagaaggaacaagtatatccttgtatttgtcgactactttacgagatggaccgaggactttgatgttcttcgcctggattcggtgaccttcgtggaagtaatggtgaatggagtggtggcgaggcacggggtgccgtcacgattgccgagtgacaatggacgaaacttcacgtcggagattgcgaagtccttctaccagacgctggggattaaaaagctgtacggtttagcgtaccatccgcagactcaaggactggttgagcgcttcaatgggacgctcatggacatgctgatgtgacgaggcgcgagtgccttttgtgatcggtagagcaaaagcaagtcttgagaatgtgactcgatatgcagacgaccacgagctagagagctaggatcgtccacgcagtgagctgcttgagaaatatcagcacaccgctggtcaggcgtacgcttgtgtatccccttgtggttggttcttttgatcggcgattagcatcaaccccgcgactcacgaatccacaccagtcaacgccaacaaacacttcaatccaaatatacagagttaaacacaatatacaatcacacagatacctcttgtcctctcttctttctctaggcccagggctaaggtcaaatctccaagtcttcgggtccaaacccaagacacttggacagtcttgtggacgcgcaccactcctctaagaggagaacagcaattcaatcaaatatcgacctatacagcctaataccgatacaactcactcttaggagcctcactatacgcttactcccgcaatatataacacaccaagccaacacggcgtatgtgcagaatatgaaatagataagttcacgcccaggctttcgcaatggatcccttacctaaagaactttgaatttttggtggagaacgctctcagggcttcggctcaacacgacttcggcacttgagggaaaaacgaactctgttttggttaaaggctacatgcaaagacgatctttccagcgacgcctggtctctgggttgactactggatctttctccagagtgttggtcctgatttttatcgaagcttgaagggtcgccgtcgtgggtaaacctcagatcttgagatgatatgagatcatcgcgagagtcttgggattcccgtgattcttgagtctaggtctgggaggaaccttggttgaaggccttctcgagttttgtgggaagcaagtccgggatagcaggctccatagagtggcaatcttgagaatatcttgggcaatccggaaagcaccccgaataccggtcgataactcgtgccgaactccaccttattacaggattcagggaaggatcgcacgcattcccatgtgcttcagggaacgggatcaacttaaccgcagcaatgccctttttcaggggtgccgggtacccgaaaacatgctcttgttttgtagaccagacctcgaaactccgggattctgcagaccttgagattgtaccaacattttggcacacccgtccgaaccaatcagcgatcgtaaaaaatactctgagccgaagatgagacattgaagtccgggaaagtttccactcgcgggatttgggataggcgccgcgccacactgaaaatgcacgtgagtgaggctcagacggattgggatctatatttgccgagggtgttattcgcctacaggacgtcctaccatgaagcgttgggcgacttgcccttcttttctctctacgggcacgatccggttttgccgctggacgtcgcattcctgaacctgggcaagaagtggaagagcaatgaggtagcagcgtaccgtcgcgagctctaccgtaccttgcgcgactcgcgtcacctggtcgagaggcagctcctgaaggcgcaggaccgacatgagcagcgactgggcgatcgcgtggctgtgcagtacgagatcggtgatcctgtttgggtctatcaactcttcaggaacaagaggggcgaggcgaggacgaagaagttggcctttgcttggcatggtccgtaccgtgtcgttggtcgagtgggcgaaaacgcctatcggatcgacataccgtcgcatccagacaagatcgtcacggtgaacgtcaaccggttgaagaagttccgtggccggtggactcggccctacatggacgaggtgccggaaggtattgtggagggcggtgatgaagttgaagacggtccgctggaggaagcggatttaccggcatcccgtttcgcggaacgggtgaccataggtcgcggggatacggccctcacgggggttacttcgccgctgctggagattgttgcaaaacaagtggtcgaccgtgctgtgaagtacctggtgcttacggcgaattttgagagtcactggattcctcgggccgagttaatgcccgagtacagcgacttagtgacggcttttgagcaagccgaacggaggaagcagcgcctgcctgagctacggaggagttcccgtttggaagaggctaacgctgaagtggaagacgaagaccttttcatggcttagcagcgtcggaaggggtgttgttcgtgtcccaagggacggtcgtgtacggcgagggtacggtcacttggaactcaagaacagataggtggaaaaggaattacgtgttttgaatttgaattattggagggacgctagcagatttgcagaaagaaaaatgaacgactggtgtcgcgtccctaatgacggctgcggcttacttggacttgggagaagccggaggagcagcactcttcttggacgaagtgtcgtcgccctcgtcgccgacgctactcttcttgtcgtcgtccgtggggtcgttggcgcccgaactgcggtcttcgtcgacctcgtggtcgtcttgctcttcgtcgtcatcctgatcttggtcggcctcggtctcgggcagatgttcgtccaactcgtcgggctcgccgtcgtcctcctcgtcgagatctggcgtcgggggcagcaccgtgaacatgtcttcgtcgtcctcgaagtccgagtagttgtcgcgctactccttgtcctcgtcgtacgcctcctgggcagggaacggttgcttgcccttcttcacgagcggcttgagcttcttggcgagggctcggatgcgagcgtcccccagcagaaccttccgggtgccggcgctcttgttgccgacccacgacgggttgggcgggctgccgccggtgatgtcgatgacgacgcgggcgagggcttcgtcgctgaggcgaaggtgcgctggcttggtcgggttcagcgcgtccgtctgctcgaggagatcggagatggactggtatccgtcctcgtccacacggtacggatcaagggcaggcgatgatggtgtcgtagcggccacggtcgttgcggaacagtgtggcgaggtcgaagacgtccagaaagtcgtagaagccgagctcgacgatgttcaggctgatgaaggcgagccgtgcctggccgacgttcgacttcttcttgcggcgggcgttgcactcgtcagaaggcgcgtacagcgcgcaggcgaagaagacgtcgcgccagtgcatccagaagcgccagtgcgccacgtgcagcgcagggtgctcctgagggtcatgccagacacgctgaccggtccacgggtacgccatacgcggaggagtcttgccctgggtgcccgcctgcttgatgatcttggagatgtcgcgacggatggtggccgggcacttggcgggcagcggaaactcgtactcctccgcgccgtcgccctcgggggcaccctcctcgtcgtctgcgtcgtctgcgtcgtcttcgtcttggtactgggccctggacttgcgctgcatcttggacggagggggtttggaggcgctcctagtggtcggtcgcttgccagacgagcgtgtctgcggcgcgggtacggtgaacaggtcatgcgggggcgcagcgacgacgtgcagcgagtcaggcagcggcggcagggtctcggtctctagtagctcgacgggaaagagcgtgtcgtcggccaagacggcgacggcgacggcgtccacggcgtccatgttcgtggagccgctgttggcgaagagcgcagcgcgcaggcggacgtagaagtccacttgggcacggagcggggcatcagcttcagcgtccgcgccacgggaccggcgatcgaggcgtgcgcgcagccgtcgtatgacggcctccttgttgacatctcgcgacttggccatggcggaaggtggtggctgaggcttcttgggagtcttgttctcttctcggcgaaagctgaaatgagggcaagactgcgagttgccgcggcctctgctgatgcgttccgacctggcagttgggacgtttggctgcggatttcccttcctgaaaatgggagaggcacggttggcgtgagacggtcgagtgattgactagttgattgacgagactggcgacggtgggttacccgttacggttggacacttacgaggatggttgcgaacgtggagtgctgtggacgaccgtgaggagcaaactgcggcgagggcatttcgcttttgtctccatgacggacatgaaaaccgtgacgggcgttgtcgagtggtgcctgtggcactccctgtttgtgtggaagattgtgtggtgcgtgctgcgcaaccactggccggccgtattgctggtgctgattggtgcggtgggcggcgtgatcacgaggcccttgtggagcattgcggggcgattgatcggggccgtgttcggctttgtgttcaaatggctgacactgttaaggtatgcgtaagacggtaccgtcgcttcgtgaacggtccgtctgtgcaaggcagaccgtccgcggagcatcgatggaaggcgtttgaggcaatctgggccacgcccatggtggtgctcgaggcccgaggtgaacataaggatggcttaggccggctactgtacaagtggctggatgcttaccacgctctgtggtgtgtgttcctgcccgacgtgctcgagctgggtggcgagtctaccgtgaagtactggcgcggatcgagggccgagtgtcggcgctcggtcgaccgtgcctgctgcgtgggccgtggattttgggcgttcctaacgctggcgacgtatgccgtgttctacactgtcatctacgtgtatgacttggccgagaaagtgtggtgggtgtgggcgtgctactcctgaccctgaactacatgttggcggacggtgggctgacagccgacggtgggttgagccctgatgcagccgtgatgcagtggagctgcgtgctggcaacgactggggtcgccagccatgctacgaggcggcgtcaggagtgcgttcacctacgagacgtcgaggaattgcagcaagccgaacgcctgagtgaagcattctggcgtggggacgggtgcgtcgggaaaccgaagccggtgcgtaccctgagcgggctgagggcggagcagcgtgtcctgcgcgcgaagatgaaggcagacaaggaggaggaggacgctcgacgggaacgtcgagtctcagtcggggaggatgtgccgagtgggaactgtggtcaccgtctcaggtacggtcgcggccgtcctccggcagcctgtcaatcagcgcgtggactactactcgaggatcagctgttcgaggatcagctgactgagcagtcatcggactttacgaggattagctggcggcgggccatttgcgtggacgaagagtcgtgatggaagcagtggtgtgttccgcgcgtaggcggtgacgtgaggagacaggatggaggtcacgagcgctgcgtggctcggggcgtgagccttgacgtgagccaagggcggaggggtgaaaggaggtgaccatggggtcgggggcggcggtgtgtcgacgctcaagttgaagagaagcaagagagagcgcggggcgaagtgctccgtgccgggtaggttggtcagtcgtgaatttgccgtggaaacaacaagttgaatctttgcatttgactctgttgtatttcataccgttccttacctgtccgtaccggcctacttcattttcgcagcggcagccgtcccttccagggtgactcgcgacacacgcccacagccgccatcggatcgttcgcgggcgaggcaacgctcccgctcgacttcttcttctcgtccgagaactcgtcgtcttcttcaatgggacgtgacatctccttggccaatagccattcccaggcctccggaatgttgtgcgccggtcccgagtcgagacatgccaatatgcgcttgtttcggagtccgcgacggaacagctgatatctcatcttcctgttcggatagtccaacgagtcacaaagatccgtcacacggtcaccccactcctcaacggattcgcctagctcacggtgagcggactgcaaccgttcccagagctggtcagccgttcggctgaggaacaggttgtggaatcggaccttcagagtcgcgaacgtcttgatagtcgagttgttccaccaccgttcagcttcagagcctttgatccgctgtcggaacactaacagccgagactggtccgggaggtggctggtgtgagcttcgaacagctcccagaagtcacgcgccttgtccatgctggccgtgtccgagtagaaaagcaggtaggaccttgatcgcattggagaccatagacgacaagtcacggtcgttccgaacggtcgggttgttcatgtgggcacggtagccaccgttccgagcttgggtaggcatcggccgtccgttcgttgaggcactcaccgcagttctgacaggtgctttgttgtgcacgactgtcttcaccggtcccgtcggttgggtcttcaccggtctcataggttgggacttcactgtaggatccactttcaccttccgttccatcttcaccgtgggcttcggcaccgttccccagccaccgtagcctccttgctgggcaccgacgctccagccaaatacagggcctccaggcagacgcttctccgttcccgtgtacatcgggatgaagccactcggggtcctctgctgctgcacttcttcaggttcttccttcacgtagtccgtgtagtaggacggttcgtactcagcgaattcactgtagccgtagtcttccgccgaccagtactgttccgtttcatcaaattcggcatcctcaccgtcttcctcgaccgtttgcacggcctcagggcccggcgatggagccatcttcatctcgagctcttgttctgcttgaaccccgaccgcatcaccgtgttcatctgcggtcttgtgttcatcatcgtcttcatcggcccaaagagcctccctcgtttcctggcgaagcgagtcacgaccggcagcagtagctacctgcgccgtcgcgtccactccgctcgcatctccggacgatcgcgggcgtcgctgccccagtagagccgacgtggtcccaccgcgaccgttcagcttccaaccgtgccactttatcttgcacggaccgctgatccccattctctccttgctctccaacaaccgtcatcttcttcagaaagtcttcttcactcgaccttcagcacgcgatcttcttcacttgaacgcgcgaaacaaactccaatctccaaacttcaaacttccatacttcaaactacttcaggctccgagcgagtcgaccagaattaccggcggaatcgagcgtcccgttcaccgttgacgtgaccttgaccttggccgttaaggactccgaccgttctcttcttgaccttcttgaccttgaccagtgggggtacttcgcgtaccgcatttcgcatgtagagcgctacagcggtttaagagatacacctttatttagaccaatcagagatgcgagagaaaagtccgtgggatcgcatgtagagagatacacccctaattttgcgcatttttgcattcacattgagccaccagttccaagcgcgcgaaggcagaggggaagagctgcgcaccgctcgccaacgtcgcgctgccccctccccgcgcgcttggaggcatacgcctcgtcggagtgatagttagtagccgcgcctggtgtgggcccagttgaggcgcgcctgagtgcgggatatggggagcacgaggttaaaccacaacgcgcaagctcgaaagagcgcacaacacggctgctgcagcgatggtagtagaagaagcaacgctgtagataatttgttaagtggtgtggttcctgtgcaacatagctgtagatggcgcctagacttgttgctagcttaagcgccatcctagaggagatcgctccgcgccatctgcatgactaggccaaccatcttgccaattttgtgtacaaaatgatcgcgtgacccagtttttgggttttacattgtttttaggctcgagtgcagtaattaacctaaacctatgacatggatgtgtttctctacatgcgaaatgcggtaccgttctccaatcccacagcggcgccgagcgcaccgttcacacgacacaattccagatccagaccgttcacacgtccgaggcgaagactgggactccaggcagactcccgaagaccagacgaagctccaccgacgcgaggacttgacccgtactgccgtcgttcagacttcacaacgaagatcgaagaccgtaccctgcttctccaccacgtgtcgcgagtgccctggatgggacggtcaagcgttgtatggaagctagaacggttaggcagtggcacaaatagcgagaaacagagctaatatgcaaaagcaatcaacttgttctctccagtgcagattcacggctgaccctacttccttaccgcgcacggagcctgacagctcgtgcttccttcttctttcggctctctgtcggctcacgtgccgacttcaacacgtcaccggctcacctggctctcgtcccaccccttcgtccttggctcacctcacagctcacgtcccgagccacgcggtgctcgtgacctccgtcctgcccttcgcgtcactgctcacctatcactcgcgtccctgcttccatcgcagccgagcgcgccacctaaccgacgcgtcgccagtcagcgcccctccgaaatggatgactgcccgctcaccgcatcgtccaacagctaatcctccagaagtcgatcgctggccgaacggtcgtccgtgtagtaggaacggtggtgaccgttcctactcgggacactcacgtatttatattggcgccgctttacttaaattaagtatgtaatttattaacatagcctatgataaaactgttcctaaacttgcattcttctgtagcatcacctacagaccaacggcctcttccagttcgcggtcagctcgccgtccgtttgagcttaaatgctacttgccaataccaccaattacggaaatttgacctttcgaaacgcatcgcgtccgttcgctgtctctttccgcaggtctatatcccccgtcaaactcgatcttctagaagttagggctgaagaatcgctgcatgcagatgcggtacgctgtacctctctctctcctccaatcggacgcgtccttcaacagcgaaacgcggcggccgaccagagggacagctttgtccacacacgaccgccactagctgcatctcgtcccccttccagctccgtcccaagccccttcctgccctcaacgtccatgcgtttgcccaccgggccgcagctgagtcgctggcggtggctgctgcagctccaggcgccgggcattctggttctacacccgtgggggctgctcgccgctctacttcgttctcccagtcgcctgctggacggtgtcacggcctcgcaccaccgctacttggaccgcgcggccgccgcagtcacgcagaatccggtgctgttcccgaacggcttcttctccgacgggtggggggacctcaacacttcgaaaaggattcgcgagctgctgcagagccgacgcatgagcgacgtcgtgtcgctgaaggagggggaacctagttggggctgcgtcagggagctgtcggtggcgaaggtcgcgctgagagaaggcaggttccagagcacgttgggtaacgcacagcagctgctaccagagcagagcctggatgcgttctgtgagctcgtgacgccgttggactgggaacgggaggacggcggagtgccccacggggggacggatagacctcttgtgggtaagtggagtggactcaggtgaagagttaagtttgaaagagtaaccaaccaaccgtgcgggtgtgacgcagtgctgctgccgggaacaggagagcacgggttcttgcaccgcaggacgtccattgcgattccactcgccaaaaagggcgttgctactctggtaagtgggggctgaaggcattgaggtgtgctatcggagtgcctttgagtccttgacgatcgtttattgtgattttgctgtcgttgtagattctggaaggacctttttacgggaagcgcaaaccgcctcagcagaagggctccaagctacgaaggtagaatgccgcccattaaggcctgatgttgttggctagccactgagtttctcatttctgtttgtagagtgagcgatctgccgattttggggcaagccacgatcgaggaggccaagtcattgttggagcatttccgtgactatcacggctactcccaactggtgattgcaggcagcagcatgggcggactgcatgccgctatggtcgcttcagttttccctggagacgtcggcgccacagcttggctagcgccaccttcggctgtaccagtattcgctgatggattgctgtcaggatcttgcaactggcgctcactttacaaacgccatgagctgcagatgctggacaaaatgctggctggtcaggctgtggctgagtcatacgaaaagctggccaccgctggtgctgataccggagctgaggaattggatacctctgatgcggagctggatccagtccaggaagcgaagaagcgcatgaggctattcctctcgatcacggacatcgacaacttcctgccacctcgacgttcggacgctgtcgtgttcgtatacggcacggaagacgagtacattggcttcacggagcctcagtgggaggtgagttttgctcaaccattagattctgctgtccataaatctaacttgccccctcctgttgttgtgcatcagcgaatgcgcgagcagtggaagcctgcgcacttccggacgatcaaaacgggccacgtcagtggaattttgctggagcaggaagcctatcgcaagacgattttagaggttgtggacctgctaaaggagcgagacgcagcagccgagtcctcttccaagtctgctgccgtcgcaatgtaaaatgctcttcaaaggcgccaagtacaaccaaatcaacagtttaatatttgctcacgcgcaagggtgagttagctgcgactgaacgctaggtctgcagctagcaagcgactcgagctagtgtgaaccttgcaacacagctatcgagggaggtctttgagcctctttcatcttctttcacttgacgtgcgcgggcttttttacatcatcaaatcattcgtggagacagcaaacaatgatatcctggtacgtgctcatgacagtgcgcagctctccgcgcgaaaggttctctctccacatgatctcttcaatgtggttttctccatggaagtagacgcagagccgcttgaacagagtgaacaccgggttgggcttggcaatcttggccaggtatgcgcgctcttgatctgtaaacaacaactgactcgccacactcataacttgggccatcggcacattgtttcctccacgtccatctgcagcaggattatcgtcgcccaatggagcagtcggaggtgacggtagtgccatagcggcgggattcatcggtggagtctgtgctctaggcacgctgccaggtgcgctagtgttggtcgcactactgttgactcgctgtcgacgaaaacttgatgccattagggcgggtgacgaacttcccagggagtttccggctccattaccgagctcagccgcgtagtctccatcggacggaatcatgaaataaatgtagcgatggagctgtacaatgaagcgttgctgcagtaaccagatcagcatgtggatgtactcggtctttttggccgtcgacaacgtcttcatgtactcgccaattcgcctcgatccagagaacgtagacagcacctcgcccagttcatagggcgcgaacttacgccggaattcctgtgccagcggtgacgtaatgtgcagatctgccttggagttgacctggtaaatgttgtacagcgtgattgcgtccacgatacgtccaaacccccaatatacaaggtgcgcagctagacggaagacctggtgaataggtattccagtatccagtgccaggtcctggaagctcttgagcgggttcaccgcctccaccagatctcgaagttgtcgcgcatgatcagccggcagcttgctcagaatatcctccttgtccgtaagcaacaacaatgtgtggtacggccttaaactcgccatcctcaccgtgaccgcatccgtcagcgtcaacgacagcttgacccagccattcagcaccacgtgagcagcccccgactcctccagtccatgaaacacgcgcttcaagtcattggcgagcacgctcttgcccagcgacacgtcgatcaaagtctgcgggtccacctccaccgtcgacgacccgttctccccgtccttccgatggtgatgatgatgcatcaagctcgatccactggtagctgcccctcctcctccagcattgctcgtgatactgctcccactcgtcgcccccgccgccaccgcagcactgatactgttgccactggtcacccctggaatcccagtactgctccccccagcattacgttgctcactctgcgccaactcgtccctcagttgcagcagctccctcacctccttggacacgaagccgactcgaagttcctcgtgcaaaaggccattggccagctgcgccgcgacagtgtggaaggcctgggcgctgctgcgtctcctggccaatagttcctcctcatcggcctgttgcaatggcagtaattggggatcaattgtgccgtccatggcttcagcgggtctcgacacttggggaggacggtcttctagagcaaagatgatgttgaacatggtggtctcgttgccggttgatgccgtcgtgccgttcgaagcagattgctctataactgtaggtggagtcgaggacgacccgtcggcgggtgcagcggccggcagccgacgagagaccagcaccgggtggctcacgaagcgcaggtcgtccaccacgagctcgaagctggcgttgcaaagcgcgttcttgggccggaagagcttggccagcagcggcgctggcagcgtgtggaagctggacgcgctctcgccggggggcgccgggtaccggaaggctaggttgcagcccttgctgatgtcgtccacgaccagcgcaacgcccatcaggcggcagccgccggccatcacgcgcacgcccgaagccgcgttcattccaggctggaggaggtttgcgaagtgagactgggatggatgtgtgctattagttgtaaggggtactacggttggggagcatgtttgttttgtgctcttgtattgtaaagacaagataaaaagtaacttcaaggtggagatggctacattttctggtggcggggcagcagacggagtgttaagcgcgttgtagactgcggctggaggagagagtcgggcacgatgttctggtcgcggacgcagtacgcgaggctctgcgtacagagagtttgaagcatgaggcgagtgctgcccacggtctccttggagctagcgcagtcgctttggagcaggacttcgccgccgttggctagatggtggcggatttgacgcagagtatcgtcccgatatgctgcgttgactacgacttcgtccacgggcaggttcaccagttggagctctcctccagactcgtcttgagaagaagcgctcacctcctcggcgtcttcattctcttcatcttttatgtttccttgttgatattcgctgagctctggctgttgaggttgtttgtttagttttgagagctgttctcgccactttggtcctcttctcacctccagaaacttttctcgttggcggatcgccttcgatgcgtcacgcgcttcttgcttccgagcgcgcgtacgatacgcgtgcttcacctgaccgaccgtcttgggcagcttctcttcggtttgttgactgcagttgtcgctgaacaagtccggaatgctcctgcacgtagctgtccgctgactttcgtactccaacgcgcccgggggagtagcgaacagcgatcgcaggctgcctgcacgtgtgatcccgtttgatccgtcgttcggttcacaaggggctggatcgaacggaggctgcgtggcatgccagcccttgaccaagcgcttcttctcataccgagggaggtgatgcaatcgagcctcttcctccatgctgttggttagctaacgaaagtgctggtcggttatttatacgaggccggcgcgatctaaaacccaagctcgatgaagcgacgtactgctcccaaagcgttcaatgacgataccaaggcgaggtccaaggcgcctacgaatgcgaaaaagttgacgaagaagaagaatgcgaagagcgcgacgtcatgtatcttgggcttgaagaagagtcaagtcgatgcgtgctcggaaggcagtacgaggtggagcagtgacgaggggaacgccgttgaccacgtggctgaatgtcaacgtcttcggcaacaacttgaaagagttctgatcgatcaccagaggcaggaagaggagatcgttgcgctgcgtgcactggcaaagtctttgaaggaggaggtgaaaacgatccagaagcggcagcaactgcagagctctgcatgttgcgatgacaaggcatccgttggagggcgccaacgaatagggtcgcatgagtacttcaagctggatgtccaaatcgagaagcttgaggaggaaaacgctgagctccaccgtcagctccaggattcccaggacgagctccagcgggctcgtgcttacatcgcagacaagttgccagtatacaaactcgctgcggtgaaggctaacgcggagctgcgttgtgtgaagagtcaactgcaacaggagcggaagcagtccgatcgacttcaaaggcaactcgtgaagtgcaaggcgaggcaagacgacgtactggctcgagtggggcctgaacgtggaaatcatcaggaggaacatgaggatgatggcgaacttcaagagagtgaggctgtccgacgcgagcgagaggcattcttccgacaatgcatgcgtcaacaacctggttgtttttcgcctgggaataaatccgggattcagagcgacgttggtgatattatcgaggcgagaaacactcaactagcgggttccaagacggtggtaaagactgacaagctgatccacgaagacctgatggacctagatttcgatcttgacgagatgaatttatcgccgacgaagagctctaagtccatttagtgataaagaaacagtgtttttttaggctcgggcaatctcaacaagtacaatacagcggtgctcatcacatcgagcaactcaaacagcttcgttgattcccgcttgcgagctctcctggtcatcatccaacagtgattgcgtaccagcttcggccgaggcaaaaccgtaggctccacctccggcggctcccgtctcgtagatcttcttcttgcgggagatcagcacgcggaatcgctccagtccttgctgcacaagtcgctctccttcagcaatcgacgcagcgtgcgaaggatcaccaggaatcacttgctcgtactgttcaatacccatccggcgcatgactcgagcgtatccgttagtcagcgtgaacacagccagcgcgatcatcgcgagaggggcgtagacagcgaatcccctcccaaacaggtgaactacccgcgtgttcgccaacagcgcactgaaagctgtgccctcagcgagacctccaccacgaagtaagagcagagcattctgccccaatgcgaactgcagtcggcactggtggattgacgtcttgagtagacacagctccgtcgagttgccgtgagctcgaagtgcgtatttcccaggcaatcgcagagtgaagagacttgtgtagcagcacaacgcgagatacacgagcaacaaggctgatacgagctccgttgcgctgcgtagactgctgctcgtctcctctgcctctgctgcgatcaagaagcgaaacagcgagagcgacgacccgtgccagcccatagtaagttcaccccacgccacacacagcgagaggaatccagtaatgacagcgcaggcgatagctactggcgatgtgacccagcgacgaatttggtggcgagtatctaggaacaaattgtgcaggcggttgagcgctgaggtctctggatacaaacttccggccgaaagcgctcgctgcgcattgcgatcttccagcacatccacgttgatacagagctccaggaaggcttgatcacaccgacgcagttccagttgtgcaatgcgcacccgacggtgcagctgtacaacttccggcagtgtcggagctttacgagcggagactcgaccgataccgctaaatgctcgcttcattttactggaaacgtcagtgaacgaggccgatttgctggctcgcttcgcctcgttagcagggtccagactgctaaacgcaggcttgctcttctccaccagcgccaaaaccttcagcaggcacgtcttgacgtactgcatctcgcctgtgagaataatcgcgtcgctttctgcctgcatcatgcgctgataggcctctcggacgtcggcaaccacctcgtcatactcgaagcgagcctccatcctctcgtcctgcagctgcaccgcctggaagtgcagtttctgaagctgtgcaccgtccagacgtcgcatccagcagctcctcgggatctccacgagtccgtagcccagcagcgcgatgacccacagcagtccgtacgtgttgctagccgccatcgccagccccagtactccgtagagcgacaagtggtccaccagaatcaagtacagcgccacgatgaacagcccgccagccagcaccgaccaatggaagaccaagtgcctcagtgagctgatgacgcgcttctcgagctcgaactcgccgttctggctgaactccaccaggaacggcagccccacccagctcatgctgaacgtgagccagtacagcagtctccagcccgtcagatactcgttaaagttggctttgtcctctgcagtgccgccaatcgattgggagcttgcagtgagtccattggtggccaagtccatcggcagcagcagcagccccaggaagcccagcgcccagctcgtgaacacggcggcgtgcaccaccgtcggcactttggcgtctttgtagtgggccagcagccaccacgtgaagcccagcagcccgctcaccgctagaagcgtcgccagcagcgccatgctacactgagactttcgtgaaggaatggtctgcgtctcttcccgctcggaagtatcttttcgcaagtcgaatctgtgtacaccacactagattcaatgttgaccaatcaatgctgactactgtacctgatgaggtacagtagccagcacagcaacaacattgcacgccgatgccggaggccgagccgcttgacgagaccctggcgttcctggacgaagccctgcgtggagtcgacgttaacctggatgacgccgacataagctcgctaagatctccactgtatgagcctctgtggggcgacattgaccaagaactcaacctgctcagcttttccaagcaacagtcgaagtcaaggaagcggaagaagaattataaccagaacaaggctcgagaggagcgtcatgctgaaatattacagctcagaagcgaggtggaggatctcgagttcacgctgaagcggctccagactatcatcggctgcatgagaggttccagtcgcacacaggagaagacggacaagaaattggtgtggaaggacgcatgcatccgccagctggagcggcggctgagagctgaacgagaaaataggcacttgatgaagggagttgagaaggacaaacagttcgtcaagagcatgcagaagctgctcgacactcggccggcgctatggaacatggtgtatccgggaatatgtcaacgcacaaggcgcatcgagattcctgcaggatacatgaaggagatggcggatttgattttcgtggagttagctgcgggtgtcgaggcgttttatcgagaggtcgaaggtttggaaagagctgtcagctctttactaacacgcttaccagcgggcgagccactgttacgtgacgctatcattggtaggcgcctcgaggcattctgctacaatgatgttccgtttggggtggcggaaactggagatgcgtggtggcgatactggaacagctacaggggcgaagtcgacagcgttgacgatgtcgtcacagagagttttggctgggaaatcggcgacgcggctaacacgtcagtgcgtttctacgtccaacagattcttcggcggcacgtcgaagacgatcgcattgtgtttgtttggaacggatacttcgagccattcatgtttaagggtaagcggattcgaggcgtctactaccgcgagcaaagctacgtgctcatcaagcctcaagtttacgacggcggcgtctgctcacggatttcatcttgcgagatgatcacaccctacttcttggagccaagcatgattaacgatcccacagtagctgcagtaaccaagtttgtggtgagctctatgtcgtccgacatcatatcgtggaatgaaatggtcgagggcttactattggaccaggcacgacaaaatcgacattacggaatcgacggccagcaaggatgatgtgtcgtattgagttggaatgattcacgtgatctggtcttataagaaacaacgtattttcacctcctggaccactccttacatttttgtcgatgctcacgaacaaacgacacacagtatcttagctgacgctacactattgccagcgctattatagaatagagctaatcgtcgtacgtgcagtgatctactccatgtgcacgcagaatcgcatcttggacaaagtcttcaattccgtttgaatggtgtggtggacacgatcatcatcaatggcttccgacggcgagtccctggaggagaccttggccttcctagacgaagccctgcgagaatcggacgctatcctgagtgacgacgatcaaaacccattagatacccacctcttcgcgaccttgggaggcgatattgaccaagatctgggccttttcactgcgaacgagacagcaggcccgcaacaagcgtccaagccacagccgacaccaaggaagaggaagaagaactacaaccagaacagggctcgtaaagagcgccatgctgagttggtgaaactgagggaagaggtacaagaccttgagtttacgctgaagagactgcagacgattcgaggaggacgcagctcgtggggtacagcttcctcggagaaggagatggaggcgggtacaggaacggtgtggaaggacgcgtgtgctcggcagctggatcggcggctgagagctgagcgagaaaacatgcacttgatgaagagcgttgagaaggacaaacagttcgtcaagagtatgcagaacttgcttggtgtgcggccggcgctgtggaatatggcgtatcctggaacgcgtaaatgcaccaagcgcattgagattcccccagactacatcaagcatgtggctgatctcatctttgccgagctatccgcgggagttgaggcgacgtatcgtgaggtggagtgcatgaacagagctatcgagcctttgctgatgcagtcaatgacacgtgaaccaattcttcgtgacactaggaaaggcaagcgggtcgaagcttttgaccggactctcttgcatttgacgtgcgccaaaccggagacgcgtggtgggaatactggcacaactacaggggccagcgcagcagatatcgcccagaacatcgtcacagagagtttcgggatcgaaatcgccgacgtggaggcgaacacgtctacgacgttctacgtgcagcaggttctgcggcatcacattgaagatggccgtgtcgtctttgtctggaatacgtacatcgagccattggcgttcacggcgtctattacagaaagctacgtgctgatcaagcctgacacggagagtgacaactgcacctgcatgtcctcccacgaagtcatcacgccgcacttttggatccacggctgaccaaggatgctacaactgcggcggtaaccaagtttttgatcagcttcatgccctcggacatcacgacgcgaaacgaaatggtcgagagtttgctactcgaccggtcgctggaacagcgtcgtcacgctggtaaatcgtgaaaaagagctcgcgttttcacatcatgcggtgtgtattccactgtaagtactcgatcggtcattgtactagagtcgtcacgctgatgcacgataagccactgcatgtagcttgatcttccgcatcacttgaagttagcatgaatttaatgttcccaacaccaaattacactcattacagaattctgcccgaataaggaacgggtgtacaactaatagcctcacatatttaatattattttccagtcgatgtggcgatagggggatgtgcaaggtactgaggtactaaggtgaaaaatccagtgccaatcatcagctctccaccctcgtttgaaaaatggcacgcatttagcgatcttactagacttcaaactacatgtaccgtagtggtagactcgcacttttgcttttgcacctcgccccacaagcccacctcctccccccactccccccatgcagtccacaccgtccaagcgtctccgtctcacttggtctgagaaagtgggcatcctcgacaaggtgaagggctagataatccctacgaggtcgaccagttgacagcgctattgtggtgcgaggatgcctggtcaaaggttagtgcttcgaccatacgccactgttggaatcattccggactcgtaggtaaagctgctcttcagttcattttgaaataactaaatcagtacattggaaaagtatactcaacttaacatcaatttatatattctgcgtctttatatatatcaggcgttccttactcgggcagattactgtaatcaatttcccgtttcccacaagagtatctccttaccgcatgatgacttacgctaaccccttcgacgcgcccgcggcaacagtccgacccctctcctagtgacgacgccggctacctctcgtcgttgggaggcgatgaatgggaccccgaagtgctgctcgaggcgatggccgacgacatcggcgagtttggactggcgcaaagcaccgaagagccagatcggatgaagaagacgacgaagaagaggctcaactacgacccgaacaaggcgcgaaacgagcgtcggaccacgttgatccaactccgcaacgaggcggagacgctggagacgaagctcaagcagctgcagatcgttcgaggccaccacaagaaacctagcggccaagccaagggcagtcaaccaaagactgctgctgggatgccacacgtctggaaagagtgtgtgttcgccaacttgaccggagactgcgagccgagcgggaaaatgcccagctgaaggagagttgcgagagggagatgcaggtagtcaagagtctcaagcgactgctctaccgacagaccccgccgtcagatttgatatacctggaaggaactactcatacacgacgcatcgagattcctactgggcgtatgaagcacatggcggcgctgattttcgagcagctctcttccggtgttgagcattcttacaacgaggcggagattgtggtggagatgaatagtcctgtctccatggacgccatgactccaaagccgctgctgcgtgatattatggacggcacgcgcttggaggtgttcgaccaccatattctgcccttcgacatgcgcaccgctggtgacgcctggtggaagcattggcacaactacagagggcgacgcgttgatgagggtttcgtcacggagagctttgggttggagttcaatgacaccaacgccgacaccaccgctaccttttacgtccagcaaattttacggcgacacattgaggacgatcgcacagtgatcgtctggaacgcgtacgtcgagccgttcatgttcgaaaacgagcgcgtctcggacgaaaacagctatatggcgcacagatacacccggccaacctcaagacgcctgtgaggctcgaaccaggggacacgcatgaccggcatctactttctcgagcgaagccacgtgattatcaagcctggacttgttgactgctatggtggtgaagctgcgtcgacgcggatgtcaacttgtgagatcgtcacgccccactttctagacccaagtctgaaagatgaccccaggatggctgcgttgaggaattttgtggcgagctcgctgtcctccaacatcatgaggcgcaatgagaaggtcgaggatctgctacttgatcaatcattacagcgacacacttagaagacaaaacattggagagtctttgcgcttggtaagctacgacattcacctgtagttaccgctgactgactgactgactgactgactgactgactgactgactgactgactgactgactgactaactgactgactgaatggagttctattacgatttatggttggacttcgttatctgctaaaccttaggtgtagcatgattttagctaattcaacgtgtccggctccaaaacgttgttcgcgcgccgatgtccacatcggctaatagaccttttgaatgcgtcaccatgcaatttgtcactgcgagcagatctgccttcctgagcaaaagagatcgatgccgacgatggagagagcgaagatgcgcagcaaattgatgaagaatgcctacggtgagtgcacttgccggcaatattgaagttgcgtcttgaaacgcggcgcgattgcgatttatccatatttctcgaagaaagaggccccgcaaacagaaccaaacgctgagcacgctcttgttatctttccaatacgggagaagaatgtctgtcgctccgtagatgaagttagaccatcgaattgaacgcgtcaccaggcaagaccaaaccggttgtagggccaaacgctgtgtggtagttcgcaactccaaaaacagtggctcagcacttcgactctaaaacagcctgggatcgggcaccttgttgggtcacgctggcgcagctcgagaaagtagaatttagcgttcacagggagtacatcgtgtaacacccgaagctgcatgtcgtagacagtaggtagacagtaggtagcatgtgccgtcgaaggatggagagctctttggatgcttgttgtagacaactcggctgagtattgagcgacgcagctcgcgtagccgaaatgtcggtcgtagaatataggtaacgtgtccacgcatgctttggcaacattgggaagtaccaaaaacgtcgagcacttttgattcccacgagttgcgcagtagtgtgcgaagttccggccacgctggatgttctgatctggatactacccagtattgcttgagcacgaaagtataaacgaaatgtcaagtagggtagcagatgcgactcgcgtcacgcgagcgcttgatgtcatgcatgtttgcattgacagccacaaaaccttgctcactaacaagagttccatgcgaaaacaacaaatcctgtagaaagcgatatccatgttgttaaagcttggcacagagagaagtagacgcggccgcctcttttcctgaaccagcattcaattgttctcgctcacaggtgccgtcgtttttcagttgaaaggttggcaacacagaaagagacgaagttgttgccgcttcaagaagagatcaatgtttggcaagccaaggcctcaggattggctcctctcaccgcgtgccaatgtactctatcgggcagtcattgatcagggattgccaccgatgtattgttttatgttagacaagacaacgtgtagggccttataccacaatagcgatatcaccattgtcgttacaatcaactttcgaccctcaacagtgcggccacgaaaacaccaacgggacaatgctccactttgtgctcacggtcattcaccagttttgagtcagtgtcttcacgtccaaatgtcagtccaaggtaacgaacagtttcaccaggtttgacctcaggcaatggagatgacgattcttctatcggaggtccagcgagttgccaaagtttacacttaagcacattcagtttagcaccggagcctgcacagtattccctaacgacgctcagttgctcgtgcagtcccgacaccgatcaggaaaatagtaaggagtcatccgcaaagaaaacacttgcagtcgggggtctaatgggcatcgatattcccgtcatccttcgttgtcgtaagagatttcccagtggttccatagggagaagaaatagatatggtggcaaggaatcaccttgtttgacaccacgtgtgggaaaaagttttgtttgtggccatccgtctataaccagcgagcacgcaggtttagaatacaaaatctttatccatcgccgtgggccaaatccttggcgttacagcaccttcaatagatagtcccagttgacgcggtcttaggctttttcgaagtctaagaatgatgccaacccgaagagtccatttgttcggcagtacttttgaatggagtgaaccacttgtacttgactgagcaaaagacagaatgccattgaattgaggttagcgagtagcaacaagtaccggtagctagctctgaggggcgtctccagggggagacgctgctaatgcaacacgaaagccaggttgaagcctggtacaagcagagatgcgccgagcacgaagtagtgacttggagcggagttgaacggagactggtccacgtctctggagcagagtgacacatctggaggcgagcttcgattggtactgcgtcgacacgggaaccgctgacgagatcgatgtcgagacgggcgcttgtccacgtagacttagaccattacattgaaggtctttcaacagcggttttagacggtgaacaatgacttttgacataactttcacctctactggcatcagagagataggacggtagttacccacttgtgcacgtgatcccttctagaacagtaggaacacctccgtgtggttttggtgggcgaggagcgtgccgcggcgaaactggtcgcgaaatacaatggccaggatttttccaaagacggttggtgctagctggaagaagcgggctgtcagaccgtctggtccaggcgctccatcactacgcatactcattatggcatcagccagctcatcggcgctgtagtcttcatccagattctgagcttggtctgcctccaggcgactagaaatcgaccttagtagttgttcttgagccgtcgcatctatctctccatcaccactctgttgaaaccgactgtctccaaagatctgcccccaacgcgtcccgtccctaacgacgactgggtccgttgagatactgccgtcctccagttcaacactatccatgggaacccgtcggtgcttgtccggcggacgaaagaaaaatgaagagcaagtttccgtggagcttgctaagaagtcaaacttggtttcccgtccgtgccaattccaatcttgggagaattcatcttaatgaagtttagcgtcatagagagcgaccgtattccttggcgatggatccagtgctcgaatagtcgcgcgttcttcttggagaagaataagtcaatccttctctttatggaagcgttgtctcaggtatctgttgcgcacttggaggtgatgccgaatcctgtacttccaggctgtccaaagaaccctaggtttatcagacgcccgaaggctcggtagcaggtcctgagccgcttcaattatgtcacgcttaccccaccccggtacgaggccaggattcctatgcacggactattttttcacacgcttgatatcaagcatgttaaagaaagtatatacttggaatttgtattgaatacatagttggtgtgctggtgtttgcggtgcatgatcttactccacgcgcgagacgacgagaaagaagaaaacaaacccgaacaaggcgcgggatgagcgtcggttccagttaattgagttgcaggaggaagtggcagagctggagttcactatacaaaaactgcagtatttcaagagcaagagacccgaaacggataatactaccgcagaagaagacaatgaagtgccgcgcgtgtggcaggagatctgcgctcggcagattgccaggaggttggaggcggagcgggagaacatgcgactcaagcagcagttcgaacgagaaaagcagctagccacgagcttcaagaagctgctgtacaatcgccgggtgcgtcgagatgcagagccggaggggacacaatccacgaaacgtaccgatatccccgaaggatacgtcaagaagatggcagcgatgctgtttgacgagcttgcggttggcgtgaagctgtgctacggcaaggtggggaatattttcaatccacaacgatccgtcccgctggatccaatgcctcgtgggctgctgttggatcgtggactagaaacgagatgggaagagcacaagttttacagcaggaaaactatgcccttcggcatgcgagcgactggagatgcgtggtgggagaactggcacaactacagaggtaacaggtttcaaggcctcgcggcggacgaattcgtggagcgttttggactggagatgagcgacttcaagaccaacagttcgtcctacgcctacgcgcagcagattacgcagcgacacattgaagacgaccgcattatggtggtttgggacgcgtacgtggagccgtttggctttattaacgagcgtgtgggcggcgtctaccttttagagcagaactatgtgctgatacagcccgagtactggagtagtgagcgacatggggagaagaatggagggtgttccacacgcgtgtcaacctgctacgccatcacacctaactttctggattcgaagctggaagaagaccccaagaccgtcgcgatgatcgacgttttggtaagcgcgatgactaccaccgccatggcgctgactgaaatggtagagaatttcctgctggaccaggcgctacagcaattctaagactgggataggctgcgctgacgagttgttgccgtcctccgacatacagcaacgcaggtaaatctgggaattctttgcacgttacacagtaaatcacggaatgttcacttttaacatttaaaaatgtttactccactcagtttgtcttctcgtcgttgcattgttgcagcgctcggtccagcagtagcgtctccgtcatatcccgaagacttatgatgttagatatcacggcgctgctcagaaaattgaccacagcatccgtcttggcgtcgtccttgagtttggggtccagaaagtgaggcttggtcacaaaacaaagcgatacgctcgtcgaaaacttgtcctgggcctcattgtcgggctcaatcagcatgtacatttgctcgagaaagtagacgccacttactcgttcgttcttgaacccgtacggctcaacgtacgcatcccaaacaaacacaatacggatcttccacgtgacgtcgtgagacctgctggcaataggcagtggcggacgtattggtcttgaagtcgttcatctcgaggccaaagcgctcgataagctcgttcagtgagacatcttgagtgcgttggcctctgtagttgtgccaattttcccaccaagccacacctgttgcgtgcatatcaaacggcacgactctcctgtcgaagaatttcctctctcgaccttccgcactcatatccccatcaagcagagcacagtgaaccactgcagtcgtagcgtcggagttcttaaaaaccctgtccacattccggtaacacgcctgaactccagctgccagctccttgaacaccattgcagacatccgctcaatgtgccctgccggaatatccgtgcgtcgcgtttgtctctctgcttctgacttggaattatccggtctccaccgtttgaagagcagcttggcgacgctcgtggcaagttgcttctccgtctcgtaccgccgcttgagttgcacgttctcccactcagcttccacgcttcttttaacttgacgggagcaaatatcttgccatactttaggcatcccaggagaggcctcagaccaatggcgagacgcactaagccgattgggtcttgagctcttgatacgctgaagttgctggaacgtgaactccaacttggcagcttctgcctgcaactcaagcaactggaagcggcgctcatcccgtactctattggggttcactttcgtcctcttcttcgcgttatgttgcctggcacctcgagatgccccagcgtcttgtgttgtcggaaggctgacgttgtcaatattgtcatcatccggtatcccccagtgcacaagcggctcccaagtatcacccgggggtatcgattggcgctgctgcacatcgagaggggcctctgggctctcgtccagcaaggcaagcacttcgtccagctccgacgtcatgaaaattgtttgtgtaccgtacataaagtgcccgactctacgaacgagtattcgtcatagtgacattaccgtcatgtcaagaactccgggataccggccggatgatggtctcgaggaaacatgagccctctcttcgttgcactgcttcagtgcccggtccagtaatagagtctccgtcatgtctcgaagatttataatgtttgatatcgcagcggctaaatttaccacggcatcggccatggcatcatccttgagcttgggatccagaaacagtggcttaatcactagcaaatcgacacgcttgtcgacaaaccatcgttgtcttgagagtcttcaccaaatgtctgcttatctggctcaaccagaacatacagctgctccagaaagtagatgccgccgactctctcgttcttataactatacggctccatgtatgcatcccagacaaacacaatgcggccatcttccacatagcgctgcgagacttgctgacaataggcggtagcagaagtattcatcttgaagtcgttcatcttgagtccaaagcgctcaataaactcatcaagtaaaatatcttgagactgttggcctctgtagttgtgccaccaagccgcgcctgttgcgtgcatgtcaaacggcacgacactcttgtcgaagaacttcctctacctgcctttcgggtttaaaccgccatcaagcagcacagagtgaatcactgcactcgtagctgctgagcctctagtctgaaaacccctatccacgttccaatagcacgcctggactccagccaccagctcagtatcattgcagccatccgctcgatgagtcccgcagggatatccgtgcgtcgtgtctgcttctccgcttccgtccgagccatcctgccttcaccgtttgaagagcagcttggcgacgctcgtggcaagttgcttctctctctcgcactgctgcttgagttgcacattctcccactccgctgccactcttttgtcaacctgatgagagcaaatatcttgtcacactttaggtcccccgggggcgtcttcacacccgtgactcgacgatggtcttgaactcttgatactgtgcagccgcttgaacataaacttcaacttggcaacttgcgcctccaactcaattaattgcacccgacgctcgtcccgagctttgttcgggttcacctgcttcctcttcttcggtgcacgtatcaccctctgattctggtcctgggaggttccaaactcttgtgccgtcggaacgctgacatctccaatgccatcatcggtagactgcatgaaaggttccccgccctccccccggggcggctgcgtgtcggctacagctctggagactcgtccagccacgcgagcacttcctccaactcaagcttcgacgtcattattccctcccgaatctggttcagcacgaagataactctacgaacgaacgtcgaaggagttcttgagatgatagaagtacggttcgctgcttcctttttccagctttcataatcgaatgccaccgttccacgaagtaaaacaagcgcattattattgccggtcagtgccgcgaccacgtagcgcgccgcccacacgagcagagtgacgactcgactgagcagaaatggagccacgcgaaattgacagtgttggccgagaacaataaaatccaagaagactcggtcctgcaagttcaaatttcccagtaccagcacatccagaagtagtccagcatgaataagccagaagagaactatgcctccaattaccagccagtacttgaaccgaagccggtgtttcataatcggcgtgagcgcatccgccgttagcacggtatgcgccagcacccaactggaaagcaccccacaggcagaaacccagtgccaagtgagcatgtcgacgacgcacacaccggttgcaacaacctggaacatcaagaagaggtagttgaatgacgttacgatgctcttaaggaggtggcgttgggagcagcacaagtgagctccactgaatagagaactcatcacgagtccggatacagcaagtgctgcagttccactcgaattactcggcaaaaagagcgagagagcagcgaatccagcaccgataaccccgcacgagtatagcactatacttttccatgttgacacgtgtgtgatcgctccaaaacgtggccagattgtcttgagtgggtcaatgtctgcgtatcccgagatgagatacatttgcaataacgggcgcaagaccttggtcttgcttcttacagagatgaacatgagtcggcggtggcgttgactgctcctcagttcttggacggagttgcggtctcgatagggcgttatagtctcaagtcgtgggccaattgcacgcaatgcaatcttgcatcgatacccttgcgctcgcatggaggcccctgggttattcttctggtgtacagaatggatataccttcgatacgtatgtcgcagcgacaacattgccattgtgtcaagtgcattgacgagcacatccttcgtcgaaagtgtacgaccactcgcaacgagcaaaacgtgatgatgaacgtcgtcaataagtcccagagatagccataccattaacaacaagcaaaatgctaattcacccagcgccactaacgtcatgaaagttgagtgccgaagattcgcttcttggaacagcgagttggtgaaatataacgagtaaacaagcaccatcgtcactcgaagatccatgagaacaacactgagggtgatggcccagagcatgttggcaagttgagtgaaacaaaagtcgaatctgcgggccaggaccttcatatactcgacgcgcatcccaccgacaaacaccaccatacaagggagtagtgatcggagccaaaatacgcccaaccgagactgaagaagcaaaaaccacgagccgtaaggcgaatgcgacgacgacggatagctggataggatagccgtatttgataacgatccggttgtaccttttcacagcaatcggactcagtaatgctgtcttaaccatgcgtagcgggtcaaatgctggtagttttgggtccagcgcaacgatccgatagttcccatcgcacttcaaagaatctgggacttggtcggaacgcacaatcggatggatcatgcaagtgaaaaagtcgatgcttgtctaagtggtgcagtcgtacagtgcatacacagagcttacaaccctcgaatgacaccacgatgccgcccgattgccaacctcgctgccttgactgaaacgttttctttacttcgtagttatcgagcttatacttacttatgtagtctaactaataactacttcagtattatctataaatacccaagctaaactatgtagagtttctaataacaagactctgtatgcaattactttaaagtacatgttccctggactaccttgcttggcattgctgcagcgcctggtccagtaggatattctcaaccattgcactcaacgccatgatattggtagacagggcgctgttatcactgcgacggtcttggggtcttctttcagcttcggatccaggaagtgaggtgtgatcgcataacaagttgacacacgcgtcgagcatcctccgctcctcccaccattcttctcgctactccagtgctcgggttgtatcagcacatagttctgctccaagaagtagacgccgcccaagcgttcattgtcaaacccaaacggctccacatacgcgtcccaaaccaccacgatacgatcatcttcaatgtgtcgttgcgatatctactgtgcgtaggctgtggcggacgtgtttgtcttgaagtcgctcatctcaagcccaaagcgctccacaatctcgtccgccgcgatgtcttggaaccgttgacctctgtagttgtgccagttctcccaccacgaatctccagtcgctcacatatcaacgggcatcgttcttctgtcgtaaaacttcctctcaacgcccctcgtcatcaccctgcgatccagcagcgttccgtgaggcaccaaattcatgggtactagtcgttgcgcatcgaaaatcctctccactttaccgtaacacactttcacgcctgcctctagctgtttgaacaccatcgcagccatcctctcaatgtacccttcaggaatatccgtacgtctcgtgtgtttcgtcgcttcgggctctgcgtctcgtggcacgcgacggttgtacagcaacttcttgaagctcttgactagttgtttctctgtttcgtactgcttcttgagccgtatgttctcccggttcgcctccaacctcctcgtaagctgccgagagcagatgtcctgccacacacgcggcattccactgtcttcctcttgagcagttgtacccaaaggcgccccgcatttcaaaattttcaaatttcagaacttttcatcccagtttgtattgatttaactagacctcgtagtacttcctaataccagtaagtagcccttggaaaatgtgactctttgcaggtttctccgcgaagtaccacgtgcgccacatacactcgtctaggtagccagttaccactgttttccgcataccacgagcagctttgatgcgctgcttgatcttcacctcccagacgccctcgatgcggttcgtatgggcgccagtcgtggggtcctcgaagtgtttcgtgtggtttacccacaggtgttggtaccgcatcccacgcaggtgcctgttgttggtaagggtgtataactttcctttgttgcgcccactcatgacttgggtcacgtacgccttaaacctatcggagacaatcaaagtactgataaacatgcataaagagttagatatcttgtcaaatcatacgcagttgtacagtcattacccaggtttgatgtgagattttatcaaagcagacagagtcggcttctcccggtcgttataaacgatacgagcgaaccactttttagtggttcggtcgactccgccgaagacccagaagtctgggtggcgggtaccacgtcggtacttttgcttcttcttcagggacgttccgtcgatctcgaccacgtgcccaacttctccgatctagcagtttaacatcattgttcagcccgttaaaaatacaacccaacactgctaactaaataatatttagcaacagaataatgtacgattttaccttcagcaacgtccgcttcatctcggcggtgcagatgtcctgggcatagacataccactagccctgctgttgtcggcgacacctccgcctgctgtgctgccgttgtgactgggtgctggaacgaccagaacaacagcagcttgatcagcttcgagaggggagctgatgaccgggcaaagaaggaggaggcccgcacgcttctctccagacggcaccccgtgcgggagcagtgccagcgcgtccgcttcacagcgacgtacaacgtcatgccattggtgcaggtaggacacagaggcgcgcttgccagaagccccactcgctgcgcccactccagcgcgcccttctccgtcgcgcacgcgctcatcacagacttgaaggtgaagagcgcgttggaggaaacatcatactcgtgggggctgggggtggcgagggggctgcgacccgggcgggcggtgtacgtggtgcgggaagtgcgggtgccatggtgccgtgctggatgcggggtgattcttgtgtggcactgactcttggttgccagaagttcgaaagtataattttgttctaatctttctgaatattaaaattttgaaatgcggggcgcctttgggtcagtgcctagaattatccgttttggatctcttgttcttgaaatgctgcagtctttgcatagtgaactccagttgtgccacttcttcctgcagctcaattaactggaagcgacgctcgtcccgcgccttgttcgggttgatcttcttcttcctcttcttgtgcgtggtcggctgactcagtcggaattgcagaggccacagacatctcgaacgcgctaaactcggcgatttggtcgtccagcagcccccacgggaagccaggctctagctctgtcagttcagacgacgttggggcgtcttggtcgccacgtccagcagcgccagcgcctcctccacctccataataactgtgctcgttctcagccccaggttctgtttcttaacgttcgctgattggctggaatgcgcaataaccttggcgtagagactgacgcaagcatgagctccgactcactggaggaggccttgctggagcacgagatggggcagaacggccatgatagtggccgtaataacgagtctattccgtcgttgggaggtgcagattgggaccccgaagcgctgctgagctccatggacgaagagatcggagaccttgacgttggcattaacctgggtccggaggaacctgcgacggagacgccgaagccagtgaagcccaagaggaagcggaagaagcagctcaactctaacagagcgcgggacgagcgcaggtttgaggtggttcggctgcgacgggaggtggaagacctgcagctgacgctgaagcagctgcagtacatccgcgaccagcagagacaacactcgggtcagcacactacagccgtccaggagcaggagacggttgaggacgacacagaggtgccggctgtctggcaggagatctgcgctcggcagcttaatcgacgggtcaaggctgagcgggagaatgccctgctcaagcagcagtgggaggaggagaagcgcctcgtcaagagcatcgagaagatgctcttcaaacgcatggctctacgcgatatggcaggccctgaggcgagcaaacacacacggcggacctccctcccggcggaatacatcaagcgcgtcgctgccttcatcttcgacgagctttcggccagtgtcgaggtctcgtaccgcgaggtggaagccgtgttcgcagccaacggcccagtgccgaagaacgtggtgacgcaccagcctctgctgcgtggtggcatgaagggcatgtacaggaggctcttcgacaaaagagtcgtgcccttcaacatgcaggagacgggggacgcatggtgggaacactggcacaactaccgaggccagagcgtgcacaacgccacatcgaacatcgtcacggagagcttcgggctggagatgaacgatctcaagagcaacgtgtccgccacatcctacggccagcagattctgcgtcgatatgttgaagaagaccgcatcgttctcgtctggaacgcgtatatcgagccgttcgtgttcgagaacgaaccggtcagcggtgtttatatactcgagcagagtcacgtgctcatcaagcctgaagacccggaggacggcgagtgctccacgagcatgtcgacgtgctacgtcatcacgccgcactacctcaatcccacgctcaaagacgacgccaagacgagcacgttgatcgacttcttggtcagtgccttgtcctccaacatcagagctcgtaacgaaacagtcgagaacctgctactcgaccgagcactgcagaagcaccacaacagtccgtaggctttagtatattatacacaaatacactggagagtgagcacagttagttgaacttctcgagagcttgatcgaagagcatgtcttccaccatctcgcacctccccttgatggttgagaagagcgagcccacgaagaaatcgatcaacgcgccagtcttggggtcgtctcgcaactttgggtccaaaacgtaaggcgtgatgacgtagcacgtcgacatgcacgaggagctttccccaccgtctctgtcgggctcgatcagcacgaggcattgctcgagaaagtagaggccgctgatacgttcgttctcgaagacgaaaggctccatgtaggcgttccacacgaacacaatgcggcggtcttcaacgcctcgcttcaagatctgctggccgtaggaggcgacggaagagttggcgttgaagtcgctcatgtccaatccgaaccgctcgacgaccatatcccccgcggtctgttcgatgtttcttcctcggtggagatgccagttgtgccaccacgcgtcaccagtcgcctgcatactgaacggcagcacacgcgtgtccaggagcttctcctctcgtcccttgacgccgtctcgcagcaaaggcctctgtacagccgggaacgagctgctgatctctaccacaccgtccacttgatggcagagttcctccacttgatgattcagctcctccacgccagccaagagctcctcgaagatgaacgcagccatgcgctcgatgtaacctgaagggatgtcggtgcgtcgcgtgtgtttctgcacctcggggccttgcgacttgggcgtcttccgcctgtacagcagcttggcgaggctgttggccagctccttctccttctcgagctgcaatttcagctggatgttctcccgctcagcgttcatccggcgctgcagttgacgagcacaaatttcctgccacacagcaggcacgcccacgtcctgtgctgtggttttgtggttggagtggtctttccccttgggcagcttgctccgaatactctgtagctggtcgagcgtgaactgcagtctctccgcctcctctcggagctgcaccagcacgaagcggcgctcgtcgcgagccttgttcttgttcttcttagccttggtcttcttcttgttcttctgctcctgctgctgcttgggctgggggtgttgagttgaggctggctggtcgacagtcgcagtccctgttctacctgttctgccgtctacgacgtcgtcctccagcgcttccaagagcacgttggggtcccattccccaccgtctagcgacagggagcccgcagcatcagcaggaagctcgcccaacaacagagacaacgtctcctcgaccgactcgtgcattggaccgaagtaaagtttcgattacatttcacaacgctgtgtactttacaggaaagttacttgctcacttcaaatccatgcggagctgcagttctgagcaggggggaggcctcgatgaagccgactgcggcgtgggggccatttccgccttgggcggcgacgagtgggacccgtacttactcctggcggcgatggatagagaagatactggagacacgcaacaagaagagaccaacccgacgtcaggcgaagcaaagaagaagaagacgacgacgacgaagaggaggaggaagcagcagctcaacccgaacaaggctcgagacgagcgccgctcccagttggttcagctgcggaaggaggcggaggagctggagtggacgctgaagaagtggcaggacctccgagctgcccatcgcctcatgaagagaagaagaccaatgatagcgatattcctgctgtgtgggaggagatatgtgcgcgtcaactgcagcgtcggctgaaggctgagcacgagaacttccgtctcaaggagcaggtgaaggagtagatgcagggggttaagagtattgaaaagatgctgttcagacgtctgatggtcaaggagatggcgcagtctgaaggcagcagacgcttacgacgcaccaacctgccgccaggatacatccagcgcatggctgcgactctgtttgaagagctcgcggctggcatgcaggtgtgctactacttgggggcgaatacccccgttccggcggatgtgaggccccacacgccactgctgcgtggcggcttgaagggcgaagagaggaggttcttcgatcggcgtcttgtgcctttcagtatggaggtggcgagcaacgcgtggtggcgggactggcactcgtacagaggccacgcgagtgaacacgtgggcgatgtggtcgtggagagctttggactggagatgaacgacttcaggtccaagtcttcggtcacctgctacggccagcagattctacgacgagaaacggaggacacgcgcactgtcttcgtctggaacacgtaccttgagcctttcgagttcgacggcgagcgggtcaaagggatctacttcctggagcagtaccacatgctcgtcaagcctgatgaagcggaggaggaagatggaggggaagtttgcactcgaatgtccgtgtgctacgtcgtgaccccctactttttggacttgactctgcggtcggaccccaagataggaaagctgatcgatttcttggtgggggcgctgttctcaaacttgaaggcggccaacgataggatcgaggacctactgctggatcaaggactgcagaagtacagcagaagtgtgggagggtaacggcaccaattcgagacacggcggttttagcgagtattgtgcagttctacatggctctagatctcgtttcgtgtggttcagttgtcgcctgattaaacgcggtttgttgatcgcttctcgtcggcttcaaccagtcgcggggtacttctgaggcttgggcttcgtctgcctgccgcatcgggacgtcactgaattatggtggatcccatacatgtactgagatgcagtacaagtaccaagttaattgcatggtaaaaatcgatacatgcatattattatatcgttcgcaaaccgcctcgtgcgttacttggccttggactgaatccgcgcagtctcgtcttcatgcacctagcggcaccggcgacaccactactgtagagcacaacaacaagtctcaggagtaacagaaaatatagtattcctttctttttttttattccgcaccaactccaacgagagatacacgcctgattctagaaactatttcgtccagcgactcgcatctattaaatattgtgagcaagcctcaatgcctgcacatcaaaccatttttgctgcatccatccccgctcgtcggctttagcggccttcttcgcaatctcgggcggggctgatgagatttaacttctccaaaacatcactaaaagtgacccttcctctctcttcgtcgcaggtggctttgctcgcctcgatacgacgaaggattttcccgccatccgcataggtgatagtgtactggcacaaggaaatgatacatcaatatgatatttcagaccgctagatcgtcttcgacttgactaggaacacctgtgctagtgctggtaccggtgtgaattaccgcatgtcttttctttcttgctgaaagttgccgttgagccggctcggtcgacatacttcttgctggtgtagcacgaaggttccgccaggttacgcttacgcttacggtcacgcaattagaccgttgggaactgtccaccccctcattcttcaggtgttctcagtataactttacagtacttagcgcattggggcaagagggcccataatagaaagcattcaacttcggtatatagacaacccctgcgtgttgacatcactatgttattctttgcgatgaagaatcaaatgacatcgctggaaaatggtgcaaattgctgccgcggaataggattcgattgctttttcaagacagaagcaattatactgcgcaaactcacaacatagaaaccgacagcgcccatccatggcacttgtgcaccaagcaagactacaagactcgggggcaaaaggaacgttattattcttttcccacttattatccgcaccgaactcgaactcgggcgtagcttgattctagcatttagtggagaaaccgattcgcagagattcatgtgccagcggccatatccccacatgtgccattgcaaaagcaactacttaatgccatgtttaagcttcaatgcttgatattcaagccagtactggcggttggctgactccttcacagtttctttgattttggcgagcttcttcgcagccttggctggatcggtgatgctcttcagcttcttcaacatgtcggtcaatgaaaaccctctctcttcatcggtaccgccttcgtccttctcgacatgacgaagcatccgttcaccctccgcgtcgattaagccggtggcagcagacaacgcatcgttcttgaccacagtgttggggttgttggccgaaggaagtgaggcaccactgacgtgaagagtggccgcaattaccagcgcgaggatgaaagtggtgcgcatatcgtttgtcggttcttggatacaataatggctttgtcgggagtgcacttgttgcttgtggggtgtggagtaaattgccgaatgaagtacggggtgaaccaaggtccgaagtccgtgattcgtttgctcgggcatcgtgcaacagaatgattcttagacggaactcgttagacaaatgtcagacagcggaataaatattatgtttgataggtagtgttgagcaaaggcgttttggcaggcactgttggtcgcattagcgaaggttcggcgcaagacacagagctcttcggtgctacccctgctgattgcaagtgccgacatgtgctaggccccggcgacgtgcaagacgctgctggtggcgaccgcgccgcgcccgcgcagttacttcagcaacgtttgccaggtaagctctcaatgacctttaatctcagggaagtcggcgagctcatcagggtcggcggcaccatgggcaaggtcgtgaaccgctcatgaacttgcaggacgactaggccagcaccaccatcatcgatagcccaaacacacgcgccacttcgcgcccatcaagaccacggctcgctcaggagaacaggacaaggacggctagcgcagccacaagaatgtgcacatcgaggacctcaagctgcgcgcgaaggtgaccgagaagctgcgcgtggcacaagagctgctcgtgttcacgatcacctccgaagagcaccacacgcacgtacatcgtggggctcaagggcgcgctggtcaagaccgagttatcattgctccccatgcccctattcagcaatcaacgaggctatacacgagctgagcagcaatgagcagttggtaatatcaaatgcaaataacgtggttctcataagcgcgtcatgattgttctcattggtatggatcatcattagttgactgttctttttgcttttttccgcagtagctttactactgtcgcccagctgagttgcccacgacggcgttttcgtgagtgttccgtaatatcgtccacggtgacgctatccgcacaggctaagaagacttgagtcgctgcgtcgatggactggccaagttgaagcagatttttagatgcggcatcattctcgatcttgcgcatgagaaagcggagctggcttaggcgcttttgttgcattcggctaggcatatcgcggccgtcgagaaggcggagaggtggaacttgcttggccttatttcctcacatccaaagcacccatgcatgacgaacagagcagcagggatcccaaaatcagcaggcacgcgacggaatttgccaccccagaagtggcacatctggcgctcggcctctgcaccaccagcctcgacgaccggctcctgcgcatttgctagcttctcaacaaggccagcaacaccggtatcacgaaggcatgccctaatagcgtcattcagcccgtcgtaagtaactgtccctgctccgatagccctcttctccagctctgatatgatgtcctggacagtatcaagccgcgtagcttcgctactgccgcaaagtccagagggacaatacggcgatcctgggtgacgagggccttgatcgtagtgcgcagctgctgcaggcttccgtcagccgtattaccgagggcttcgagaaatggctggggtgcgaggtgcggcttgttgcggacaagccaagcgaggaaatggcagtacgagttctggtacgtggcgcgagagcgtgcggtgacggtattgtcgcgaatctcgcgcacggtgcgctctaacttctcccaatcatggccttccattctggttcgacaagtatctgacttcttctgtgcgaattgcggtatgctccctagccacacactcaaacagggagacgaattgagaccacggaaaatgtctgaccttgtgtctaaccaaagtctcaatgtggaccacattgtcgtactaattttggggaatgacatccaatacggtaccactgaattgggttatgataaaacgagttgtttggactgaattggagcgaagcacaatacaaaattcgttgtaaattgtcgaggtgtcacgaaaaagtacgaaatcatgacgagcacgactacagtaaactctcttgattccggtactacttataactaatatcctcctcagtatgataaaatcgttttatgcaggatttgtatttggcgggaagccgctagcaccaccattaatcgaccaggtcccaaacgccgctcccaatgaggagagccaatcataagtgagattccaaatgacttcaacaaagtatggactggtttatcggctccaaagccaagaaaaaaacttaatgttttatttttggccggctgcgcagccttctccgccttcacactttccgccccgcatctccaacacgacagcgcgctccgagcgtgccgcacgcctcccccgccgaccaccccagacccgagtgcccccaggcgcgccccacgcaaggacccgtcgaaagcagctaaaaaacccggcagggcgggtgttatgctgcccggttttggtagctgtcggccaagcacgaggtcgtgcgcgctcgctgacggtatgtgagcgtttttctattgtgtatgactttgtatcgggactgacgggaatccatgcgctgtgcttaagttgtgggatggcgatgacgtgtgcatttgcgccttgaattcgattatccatgttgtatgaataggaatgtattaagcgttaatacaagctgcgtgatcctacgactccaagtctttttgcttccattggtgactagctggtgtgcagcggtcgacgatgccaccgttcgctttgcgggtgataaatgctgagcagagcgcgtcgtacgcagagcggtggtcagcgcgcagctttctccagcgcttccgtagcgaccccgcggctttggatcggcctttaccgtcgatactcccgagcgcagcgttgaccttcttgtccaagtcttccgctagcgtccagacacgctgcttccacagccgatacgcgacgccgtcccggtccagtggcgccgttggtacgtctacctctcgccctgctgctatgatcatgatgttgatgcctgccttgaggtcagcgcgaacaaactgttgtttcttttgggttgccgtgtgccacagctcctgtgtgtaccagttgtagaagcagccagcaagagagtgcgcttcaacgacggtgtcagtgctcgcctgcggggcctggccagcacagcgacaaggagcaggaccgtcagcgctggtggccttgctctcgtgggccgcgacgagcttctgaagtgtgcgctgcattgctgcgatggacgatagcatctgggtgacggctgcggcaagtatggtggtgtttccattgctgcgttcacccagctgtccgaagttctccgtttgccaagccgtgcgaagctgccgaccccaaccaatgcacgtgtccagcgagagccgagctcccagcgctacgttggttgcgtccagagcttcgtggaagcggtacaggtaatgcgatgtgaagcctgtggcagcctgctcctgctggactgccgtcgcgacgtcgtcaagatggatgagcagggacgcgagcgccgcatccaggactaaggcgtcagcgttgagcgtggtgtccgtgaagccgctgacgttcttgaagagctggccgcgcagggttagcagctgggcgtactcgagcgcaggaagaagctcgctcaaggtggcaatcgtgggcgtgacgcatggcaggtgcgggtctcggtatccagcgaggactttgccgacactctggtcctcgcgtgtcgtggtacccacgtacgcgaacgccttcgtgagcgagtctagtagccaagctccccgggtcgagatccactggatcgcaagctgcggtgaggcgtttgcatacgctgcggagccgcggcgcaaggagtggctgctcagccctgcggtgagcgtcgggggcagcggggcagaggcctgggcttggcgctcgcagaccatggtgatgacgtcgttaatatacttggccacgttgggccttcctctcacgcgctttgttggtggctcgttccttagttcagctttctcttcaaggttctcccagtagagtatagcttcgtcttggctgtaggacttctcccctggcaaatccgatgccgccgcgtgcggcactagcgggaacacatagctggaaggctccgacgctccgacgaacagcattccgaggccgtgcagcatacactgctcccagtgagtcgcggccttgtaaattgagatgccttgaaccaccgaagtcttgattcgagctagatgcagaaagagctcccccgatgccgccatagatagctggctcttcctagcaaaacaggtatcgatcgctcgaccaaacgtgtgccacattaacgttagtacagcagcgtcatgtaagctcttataacctgagccaacccccttaatcgtagtttcctgcaccagaacacgcaagtcgctgagcgtgcagcctggagcttcaccagtctgcacgccagttagcaaatttcgctcctcaatagttgaacccattttgtcgcgtattttcgcaattcgcttgctgtctgacaagtacagagggtaccgctctcggagcaggttcacaacgtgggacatacagcccacagcagtagccttagcaagacggcctcctcgagcacttggcttagtttgcaagaaaatggagaaggcggttagcaaagagtaaaagttttgacttggtagagcatcaggaatagacagcgacttcgcaatactagcaattgactcctcattcatgttagcaagagctaagaattcgctgaagcacttcatcgccgctgcctcctgccctgctgtcccttgcgggatgtcaagccctctcggcgcccgctgcatcttttcaaatgggagaggaaagaaagcagacgagtcacagccaccaacgatacaatcatgatttgtattgggaatttgcggtcaaatatgagtaatgcaacaattacactaaacttttgtattggacattattctagcaagactgtaaattcccaaaataattgggaaaatgttgggattcacacgaatcgatcgtgattggctaaattcattgaagaacttgtcctgattggatagatgcaatgacagagaagcgcagggaatgccaagttgggagaaagcttccttatcctacaataaagcaggagctccagcgtacccacaccgccgaccagtcattgcctggctggtgccgtgctcatgcgtccacacctcacttctcacaaccgaactggagccgtacagatcccacagcacgtcatgggagcctggatgaggatacaccagaagcgggacctcatccagaaggcgtatgagtgtccgatgatgacgcagcacgaactgggtgcgtgggccaaggcttgggaccctagtcctctgacaccgccctcttgcccagccgtccacacagctttcgtacagcaggcagtcctccttggaacctgcagaaccacttcgcctgaaacctcagccatcagagcaactacatggacaaacgtattgtagcggggtgtcacgtgttctgtagatgaacggagtcttgggaagaggacttgaggttgaacaggaaaaatgaagactgagattgaatgaagtgagtgaaggaagctctaggctacggctgttacctaggcttacagagggagcttgcatgcgcctgtcgggccgttgcaaaacggatgctggttgcaattggtttcaggttgctcgttgcaggtagctagttgcaggttgctgggtaggcgatgcatcatcgtcacacggggcgtgttttagctgagtttggttcattacgatcgacccgaggttgtagccattcccacacagccctgtgtgggagaacgccagagacccctgtcttatgattgaatgacgctgctacagtgttatcagtcaaatgaagctttaaccagcaacgaagaacggggctaaggaggtgcatccgcgcctgtatctcaatctggatgaagaggaatatgggggaaattggtgattttcaattgaaatctgtcagccatgaacacaatcatcaataattgcattctgtacgtgcatccgttgtatttggcaaaggcattcatgggctgtgcgtgcgcctcgatgcacctttatcgagcttgcaaagtcgacgctattgtcccggccagaattgaagggcccggaaattgtaacacctccgtattttttgcaattgcgagggatcgcctgctccgtttgaagcaaatgggggctcaaaatactcacataaagcaaagggagcggaagcatgcagacgccgcctccgccgctggaagccccaccaaagaggacgattgagcggcatgttttgagcctcggtgagaggcacatgatcgtgtccgacaaggaaacctagtcctgtcgactactccaaaagtcatatgttttctgaagatcaactaattacagaatgctatttctcgtaaccctatcgtgacctagcccacttgggctcatgattcttggccgattcaaaccttcatgtttgagcgcctataacgaaaaaacggctgcgaattggaccgtttgaccacatttttggaatctaacgcgtgtgattttccctagaaagtcgttgacatcatgttcaaatcgaggcttcaaatcgggcccttcaattttggccgggacaatagtgcattagcagcgatgcatacgggctcgtcgtacataatagaagtgacgatgacgactagccaaggcgaacccgtgcatgcatatcggacctaaagaaatgtatgctgcatcagtgatacgtatcggaacgaacatcaacatattaacatgtaagtagtaaggtaagcgccttatactgcgataggaagcaatgttagtgctgctatcgcagaccaaataggattatatccgtggtacgtcaagtcaaacgatgacccctcttgacatctaactggtatattttcttgaaaccggtatggctccagtgatgcactgggccctccaaaaggtttatatgcgtgggcaaatcgaaccggtagaatatttactacaccggtatgaatccggcgccgcactggggccaccaaaaggtttatttgcgtccaaccggtgtacaaccgacgacacttgtatgattcagtacgtatattcgagcagtgaacgaattgaagtaaagagaacgattggggaggactgtagtaccactagaaatacttaagtaagcatttgcattttcaagtataaaaaaaacttctacacgctgcaaacagatctcagccaaggttcgcatttgttgtaaagcgttaccagttgatatctggcatttacagtcttaaggacaattttcgggcagatgctgcggctgcgaagcaggcgcaggagatgaccgtagctcataagaaaagtcatcaataaaactaaagagggggtttataccaaaatcctcctatcccagccttcgcggagccctagtatatacgttggggcgaagagggtgatacatcagagtgagtatgacagtggacgatgtctggtttatacctagtaaaactattttaaacctacccaaaaacccagaacttacagttaattcattttttgaaaatcaacaggtttttccagctctggctataacccagcacgtggatgctggaggtgatcggggctggcgtcgatcactcagccgacatcgacgtcgacttcgcgcgggtgttcgctgccagcagcctgaaggccattattgacgagaacttgagcaaggagggggtgacggtgccttctcgcgaccagagcaaactgtccttcgccaacaagcgcgcagccagcaacttgacgctggcttatatggtcactcagcttttatttcgcatgtactgtcgcgcgccgacctacagctgaacgcgcattgtggtgtacacagcgatgggctcatcttcggacagctgagaccttcaattcgtcctggtacttcgtccttcacactagccgagatcccgtacgtgctcgtgtcgagtctgctcttccccgttgtctgcctgccactcgggggattcacggacattgacgacctgggcttctactggttcaacttgacgctgcacgtgctgtgccagatttacttgggtcagctgctgtctttcgccatgccgagtacctatggggtaaccaatcgttgtggtcagatacagaacggacctgatctgtggtcgggtttcatacattctaggcattctgggggttgcaccctcagacccccgcataaagaaaactaactccgagttgccgcaacgtgtccgctaaaacatgtgttttcatctgaccaaaaacatacaaaaacgcaaataaaataccaggtccgttctgtatacgacccatttgagattctaccgagtatggaggtggccggcgtgctctgcaactccgttttcgtgctgttcatgggctccaacccgccggtcagcaccatcctgcgcggctacaagtggatctttgacgccaccccacaccgctgctcctccatgctcttcaccgcactgctcttcgggagctgctccgacgacgaatacgctcaggtggtccagtcactacaaacaggaacaccattggacatgacgcagctttcgaggtgcacgaggacatccactaatatatattcatcaacatcgtgatgatcctgacgctggaattcctcgcactgctcgcgctgcgcttcatcgaccaccaggagagcaattcccatggaagtatattctcacgtcagacccccgatcgtaatttacccatctgtatcgtttcagattactttactaaagtgctcggatatctattttgctgtggaccaaatttggtctgacctgattcagattgctaagatgcactaaaattgttcatccaaacgataggataagatgtctgtcatgcctgtacaattgtgtgacgaataaaagtttgtgaggctggtaaaccagcaagttggtctccgttaggggatgtttcattcgggggcaggttaagtagggcaactctctcggccaatcagagtcgtttatttctgtccgatctgccctgaccaaaaagctcagggcaacttacagatttatacctgttcaagccgatcaatggcaccacttgtttgcatcatcaaaaatcggcgaggtgaatggtcccggtcgttgtcgctccgggtgatggcgccggtagcagcagtagctacattaataggagataccgcaggggtagcatgcgcatgagcacgagccagcacccagttctctcattaacaacaccagcactagtcacgacatcgtccttcggtgcaccgctcgccagagaccgcagcgatctgctatcgctgctagcaaagcatgaagtccccacacactcgtgacatagcgactggtcctggtggggatgacgcgggggacggcgcggagctgctcgcggtgaggagcggagccccatggttctgcctgacggttgtgctgatgttgcgagtcttttgggagggtccgtgctccgcaaacttattaccgtggaaaaattatggtgtaaagcacatatttggttatacagtacaaagttgccctatctaatctgccccgaatgaaacatccccaaagctttagatatgctgttcatccaaacgatatgatgtctgccttatacttctactgagtataccatgatgagtcattgcacagtcgacctaggagcgtacggttctcatcgttcctcattattccattttctgccgactcaacttactcagctatcatacccaatgaccgcccgcccgcaagtgaccgtgactgtgcgtcagtatcgcccagaagatcatgccaccgtcaccaagattttcatcgagggtgtgatggcagctgacaagaatctggactatcgctacctctgggaagagcgtcttcgcaaggacctgacgaccgacttggccgatatccaagccaacctcgtcgccccgggtgggaacttctgggttgcagttgggacgacaaacggagcgagcaaaatagtcggcatcatcgccctctatcgcaggtctgaagctgtcggcgaggtgaaatgcgtgtacgtggaccagagttgccagcgcatgggcgtcggccgcaagctcatcgcgcaactggagagctggtcgcgccagaacggaatcaagagcttgttcctgacgatcaacgccgcaaacgagaagtctcatgggttctataacgctctcgggtactcaatggtggatgaagaagacctgtacatctggcagaaaatcaaatacttcccagtccacaagttcgtcaaggagttgtagggcggattttattgccactgtagactagcggaccatcgctagggcctgtgagatcctaaacaatagagcatccagttgtcgaactcaagtctttcattcataaccactaagatggcgggaaaatattgatcgtgtctgggccaggagcaatcttgctgcgtactcgtaccagacgcctaccttgtcgcgttgtttcctcgtcagattcacctcctaagcgctgattgaagaaactgacaataccagtgcaggggcgcagagcacacggtctaacacactctccatacacctctccaattacgaacatgccatgcctcggtaccgcgaaccagtgcaatttacgcagtgcgatgagctcggcaccgtcctcctcctccacccttagaagcccgaacgatttaagcgcctcaggtccgtagtacaactggtcgtctacccaatgatatccccccaacattgtcattttattgcgtcgccccagcgcagtatcaacacaacatgacgccgagaagattgccatagtttgatgtttccaccacacgtacacaattgcccaaagtgcacgcaccaacatgatgaatccgatgacacaaaagacgaagataccgtggcccacaatgctccaaacgtagtgcgagacggccacgttaatgttgttggagctcttgaacattcttgacgcgttgatgtgcgtgaggaatgtctgttgaagagctgcccccaggatctccccaagcagagacgattcgtagcaaaacagaagtcgcttgataaacacccgagtcctttcgcgcagccagtgcatactttcaattgtctcgaaacccagcaacagtattccagataaattgtagccgagcgagacgtactgcatcttcgacaagagcccgttattggcgaccaagagaaataaatcgcccatgagcccttcgattagcaggtacagcagcacaactcggtgtagttttgtggcattatgcgttgtgagacggagttgctcgtgaacaaacacaacggcttctttccgccgaagctcgacccccatttggtcacatcttcgaccatatcgcttgcacaaaatgaagcttcgacgaagcactagaccacgatacatgacccaaacaccggcggatgcgccataccaatatgactgtcgatactccgtgcttccggtgtcttcagccaggtcgggtccgttgatgtcgtaagttccaaggccgttcgccacaatatacgcggttttatcataattacaaaatgtgccgatctgctcttcgtagaacgaaaaatacccaaaactcccgtgatagaagtacatttcgacggagtagctgctgtcggcacattcgcgcgggcttgtttcatacggtgggactttcgaggaccctatcagcacatttccatggatattatactgcgggacgacgaaatgacagagaattccttgcgaaacattgtagaagtgcgtgttttgagcattccaccacacttgacccaaataaaacccttcgagaggacagaactccgtcaaattaaccatttctttctcgagttcgggcgggacgaccagactctctgtgatcttgtgcggcgtcacgaatttgcagtagcttcgcaccagcagaatgaacggcaccagaccaagaaaaacccaagcgcccatcagcatgcgcgttgcagtgatcaatccactgcattgacacatcaacgcgcttgaagctggatcatggtgggctcgttggacgacttgcttcataatcgaaaaaatactattagtaaagtttgatcgtaacggatgcgctcaagttggcaagttctatttaggactcatcgccaaacactagtgtaagggcacgacagaactgacgtgtgccatcatatctccggtgaccgatatcaacgtcgatccgaaacgaggggctcgatcatcatggataggttggtggtcccttgccgtagtacttcaggtaagccacgtaccttttccactacgggtgtgcattgccgctgattcccaattcttctagtaacttcgctggagtcttgccaattttcttccacgtgataaactggaccttccacttggccgctatcgcagcgtcctggagaatgtggtcgatgttcacgaggcggcgttcggccatttcgacgtggctgctcgcagtctctcctgtcctcaggaagcgctttgacatgctgcccttcacttcaccgggagagtcgagcagaggactggtcagggtggtcttggaaatatccgcgggatcccgtgatgcatcgttaccggcgacgagcacagctacaaccactacaatggcgtgaaataggcgcatggctggtctcgagaaaagacggaggaattgtacgagtgagggcttgagagcgaaacgaaaagtacgggacacgaatcgcaatgcaaggagaggtccggatctcgcataatggatcgtagaacaagatcaatacttggttctgtcaggaatcgtattgtaatcgtgataacacgtcgtgcaatgctatattacctagctaagtgacaacagtggaacctcaattcagaataaaaaaatacgtcgtggaatgagacttggattttttttattgattgcactcctgacttggagagtaccttagcggagtaatatactggacgtgcacagtcatttcccgcagcacgcactctatgtcttccatcgttctcctgctacataacggcgattcgaaccgcgacggcacctactgttccattactccgaagaacggtttgcaatgatttctattcttcaacgactcggatgcactcaaaccaatagagcctaaaatcatttacggactaccggacgtaatgcttgatagatatgacgtcgctacctccatttgataattcagctaacagatgctcaattacaagcagaacgacgaagatacaggggatagtgccattatgcaacgtgtattaggaattaagccgtcctacagcgcagttgctcttctactgaaaaaatgcagtcttctcttttggcgggagccgagattcccaaatcatgccgatccgtgagtggtgctgcacgggcttgcgttatggctcctaccaagactgagtctgcgtcgagtaccgtcccgagcggtcagctcaagtctcgcgcgcctgccgtccctgtactcctggtgttcgcgcttcttctcggcttcgatctccagtccaatctggataagacgcgcttcgtaacgcaagaaacgctcgccgtcttcgcggcgaagggggcagcagcgaacactgtagatcgtcagagccacgcaggctctgaagaacatgttatacgacttgtcccactcccacttgtgggaacaaacaccccacagagtattgaatctcccaaagagttttcaactatcaccccgtcgtgggcaatgttgtcgttgttttgcagctcgtccaacattagaggctgtcccaacggacgctattttcttcctcttgtgtgcgctgggtgcggtttctggagcgtgtcatctcgtttggagtagtgcagagccaatttggaagtgacaaagtgtaattggattttgcttgtgaattcgtagaatacaggtcgaggccggacggtggtcaacaactaacaaatggaactaaaatctggcattttactatgcaacatcgcatgtatttaatagccgggacgatgcacagtattattttattgcacaagtgtatacatgtgttgcactagggtacgcacgcagttcctcagtaactgtgccttaggtctaatagtagatgttgtcgaatttagattctgcgtcaataatcaagtttcccgagatattaccactacatgtccaacttaccatagctagcgaaacggtacgcccacgagctcgttaatcaacttcttctaccaccctcgtcaacgtggtctgactcaccgctgatagttgtattctggttgaagaatataacctttttactgcagcaaaaaggtcaaggtttgatgcttccaccttctaagcgaggcgaaatactgtataaataccagccagttgtgcaacctggtttgctaccgggctctgattggctaaatattgtaccggtcaacttgacggccaagtgcgatgccaacatgcacatcagtcctgaatacgttgcttgttggttaattaagagcctacagcgtagctgtatgtagcattactgctctgtaatgatccacattatgtttatagtatatgatacgtgggtttaaagttgtcgaaagcctaccatatttttgcctgccatcacttgcatatttgtcgatagggatgtaaaagcgatcacccggcagcccacttgcccttatgatcactattacaagctttactggcgtctcgaacaccagttgagagccttggatgctatagtagcgcaaattacacgctgcccagtactagttattagctcgtagcctacggattgctatagtgtctcgccaatgacgagccgctccaaacgggtagcttggctacctctggtactgtcatagctgactctggcgtggacgattgcgtcggcgacgggccccgtggcgcgcgatattgtggtcaccgtgtccaccttcagacctttagccatctctgatcgtgcggctcgcgctgccgagccctgcggacagcgccccggggccttttgttgcacttatccggtcgcccgtcatgcttccacgcttcacgatgcagctttttagcgctctgcaccgcattgcaacctctcttttattttgcaactcacgcactgagctgttttgcaaccctgatttggtttttgtaagcagatatggtcgcaaaactgaacagtatttgctactcggtgcgctacaaaagttgcaaacgacacccagcggtttggtcgcagtaccagcctaaatccttgctgataccatgcatctggccaatcacaggctgcggatcgcgagaaatacaacccgggttgcaaatggccggtaatgtacatgtggcacattagtaatttaatgtgccttcgcaaattgtatttaggactactaaaactaaaactgatgatttgattaactgaagcgtttggccgcttgccccgccagctgtcataagcaaccggtatattcggtaaattcaagtgctgcatgtatgtatcgatgctatgtatctcttatagtatcgactctcgagttgtattgcacagagctgcagagttcgcaactttgcgtgctcgacgccgctgctgctgtagtaggcgctagcttctagcagtcagcttgaatctgcttggtcgtatcttcaccaagacgcttagcagaacgaacgaatgcagcagctttgtggtcacgacgatttcaatacttaagtatcacgtttgcgccgaggaacctctgcacctccagttcgcctagacttcatactggatgctagatgcttgaaggtgaaatgagctctacctaaactcaaaaaattatcacaaaattgtcacaacctatatatattatcactgccccgccgatagaggtaatgattgttgaatgattgtgatgagattggagagtgtatcaatttattcttcttccttttttgtccttgatgggatttgagctccggccaagagcgtacttcctgggacctttacccagtgggctaccagcagccctattgtatttaggactaccgcactacaaaactgttgtactttgtgatgtcaccttttttgctgaacgattcgatattgaagtccagcagaccacaaagagacatcacggatatttcagcggtcccctgccgtagtacttctggtaagccttgagcttctcccacttggcgtggcccctgttcatgatccccagttcttgagctaacgtcactggagtcttgcgcattgccttccacaccgcaaactggagcttccactttacagctttcttgacggaggacatggcatcttggagaatgaggtcgatgttcacaaggcgtcgttcggccgtttcaacgtgcttgctcgcagcatcttctgtcctgagggagcgcttcgtcgtggcgccatcagctctctgggagagaccaacacagagctgggagatgtgaacttggaaatgtccgcggaatcccgtgctgcatcgctgccggcgacgagcgcagctacggccaccaagacgacgtggatcaggcgcatggcgagaagctaggacgagtgaggtcttgagagcgaaatcttttaccgtgcaccgggccagtcggtgtggcccggtgcaccacgctgcaccgactggagctgacccggtgcaagtatcctctgtctcttattgaaggagttgacgatcgccaatttgattgaaggatctgaagaaaaagtgtgtagccacttctaccttcttttttttaaaagtaagtatcgtggctgagattgctgctacctgagccttcattatctactgacttgttagtccaagtcacttcgagctgcaaccagcaaactccatgtgctaaggaacatcaaaaataaaaaaatgctactgaactacaacatacatccagctaagctttttttgttaagacggcggaagcacatttttgagcgactgcgaattcgctgacactttgttccgcacacggatgcaaagtggtcggcgaacctcaacgtggttcgagctacccccgacattgtggtcgaagaagctcaccattccagtgcaacgtctctgcacacggtcccatgcgttcgccagcaataactcctatcacgacgaaataaatttaattatcttaagcaacaatgtaaacaatttaaaaataaactgcaaggccaactttccgcacagtatgtataccgtacaagtaagtggacatgccgctgcaagggcacgagcgggcatcctccgcggcggcctctctaggcgaaggcgctggcgatgcagtccttcttgagtcgctggacggcgacgaatgggacccttacgctctgctggaggctctgggcggcggcgacctcggggactttggtctcgcgccgggctcctgcaccatagacagcacagccgccatcgcctcagccgctcccaatggtcctgctgctccaacccttgagacgcagacccaaagctccaagccgaagaaggccaagaccaaaagcaagcgcaactacgaccccaacaaggcgcgcagtgagcagctgcgcgagctgcggcgtctgcggacggaggccgacgagctccagctcaagctgcagcagctgcagacgctacgcggcgcctccaatggctcattcgagcctcaaaccggtccccagtcggacgcggagctgccccaagtgtggcgcgacatctgcgcgcgtcaactggggcgccgactcaaggccgagcgggagaacggccgcctccgcaagaggtgcagggccgagtccaagctggcccagagcgtcgagaagctgctgttcaagcgcctgtcaatgcagagcgcggagcccggggcgagcaagcgcgtccgccgcgtggagatccccgcgggcttcatccagcgcgtggccgcgcgcatcttcgacgagttggcggcgggcgtcgacgcctcgtaccgagacgtggagcgcgtgctggagaccgactgccccgtgccgacgtggatggagacgcgcaggccgctgctgcgtgagggagtgagtatcgagctgttcgacgggcgggtgctgcccttcggtctgcgcgcgacgggcgacgcgtggtggaggcgctggcagaactacagaggccagcgctcggacgagacggcgggggacgacgtggtcagagagcggtgcgggctggagatggtcgacgtcaagaccgacaggcgcgcgacgttctacgtgcagcaggtgctccggcggtacgtggaagaccagcgcgtcgtggtggtctggcacgcgtacttcgagcctttcacgttcgacgaggagctggttcgaggcgtgcacttcctgctcaagggctacgtgctgatgaagccgcactgcagtggtgaggatgaagaggccgccactcgtgtgctgacgtgctacaacatcacgccgcacttttcggacccggagctgcagaagtatggcaagactgttgcgctgaccaagtttgtggtaagcgccacgtccgccaacatatcgacgagcaacgagatgatggagaacttgctcgtggatgaagccctgcagaagtgcggctgaagtggaagtcggtctaccttgtgtgctgtcctccgaggatacctctttcgtactcgcgatgtggaggttttcctggctaattggtacccttgttagagagagacgactgtggactgtggtctcatgtgcgagctgttgtattattattattatcgtccgtttcgagtcttgaaacaatttgacgccaagacccaccagcgttcattcttgagtttgcacagtcaagagcgttaagtgttacaagaactgtagcagcacgcgaattccacaagctgacatggatcccagtagagttctcagcatcgtaggactgcggcagaaccaggacgccgcacgaactaatcgctggctcacggcacaccgaattctgattgcggcatggttctgcgtcggcatggcgccgctactgctgcaagttcgaagctatctgaagttcatgacgccacacaagatcacatacactttaattgagccacctcgcgagtcggagactgcacaactggctgaactctgccccatcaaggaactgttcattgcccaagtgcgttggaatatcgaggccatgtattactgcgaaatagcccatggacggctgtgccacttcattgtcccgcagtacaacatccacggaaattatcttctaggaccggtgaagactcaggcgtcttctgtcacaccctcgagctgtgacaatgacagctacccgctggaatattacttctaccacggtagtctcggctactacgcgttctacgaagaggcggagggcacgtactgtgccttggacaagactgcgcatgtgcgtgtacgtggactcggaacctacgacatcaacggatccaatctggtccatgactccggaggcgatgggtatcggaagtcatactggtacagcatcttctgtggcgtgtggctggtgtatcgtgccattcagatgaggaggtgctacgtcgcatgcaaacgctacggtcgaaggtgcgattttacgggagaacgaattttccgaaaacaggccgtggtgtacgttcaagaaaacatgccggctgacagcccacggagcgacaaattaccaccgggcggccatgctgtacttgctcattgaaggcttgatgagcgatttgttcatgctgatcgcccaagatgggattctcgtcaagatccagtacgtctctctggggtacaatttatctggcgtgctcttgctggtgtacgaaatgattgagcacatgcaaaggttacgcgagaaatggcgagtgttcatcaatcgactgattttctgctacgagtcctcgatgcttggcgagttactgagtgtgattggactgcatcactacatcacaacgattaatcggtccattctacgagagactgagtcagcagccatagaggtctcgtactatgtctggagcttggtggggcatggaaccattgtgcttggtctcgtggttttcatcatctccgttcgggcgctctgggcagtcgtttacgtctcctggaagcatcgagccctcgcaatcttcttcgctccgtgctgcgtcgacaccacgctcgcttcgcgcaacaaaatgacgctgcttggaggctaccgctgggacggtggggagctgtattacaccacggaagctcttaaggcctttggcctgctgaagatgacggaagacgatggatcggagtcagtagttttgcgcaagctccacttgtttgagatcctgaccgataatttgttcataaaataattgggaaacaatggggcttgcgggaaattctcaaggatgtggcaacccctcgaaaactgtgtcatgtccaacaacgcccctgtttgatctaactgaaccacctgaacgtactcgtcgttggggcagttcccgaagcgcagcgccgtgaagagcaagcacgggcagcgtcaagttgagccagttgaggcccaggtcgccgatgtccgtgaagcccggaagtggcaggcagacgacggcgaagagcagactcgccacgagcacgtacgggatatcggtcagcgtgaagcccaggaagtaccagaacaagttaaatgtctcggctgctcgctcgcggtagaacgacgctctttcctcggacgtgcctgggacggcgctgttcagcgacacgatgcccaagaaggcggtggtgcaaaagatcaagccgctccgctcccttcagccaaaccaattcggagcccaatccttcatttcattctgcaatttgctccaaacccaacaagcaatcgctgtaccacactcccgctaaaggccagtacacaaggatcgacaataaatatgcgcctcacttgcatcgtcacgctggtcattgcggccactctccatgtcagtggtgcctcacttccttcggccaacaatcccaacactgtggtcaagaacgatgcgattcctgccaccgatttaatcgacgcagacggtggacggatgcttcgtcgtgtcgagaagaacgaagacgacattgacgaaaagagagggttttcttagagtgaggttttggagaagatcaagctcgtcgaccccgccaaggctgcgaggaaggccgcaaaagccgaaaaaataaggaagtcggtgaagaaagcaggcgactacgaggattggcttagactgcagagtttgaagattcaacacggcattaagtagttgcttagcaacggcacacgtagggtatggccactggcggatcggtatcccactaaatgctagaatcaaaaacatcctagttcgagttcggtatcgatcggagtagaaatggatctccatgacgacatgcacgttctcgaagttgagttagtaaaacatactcaagtagggccgccccacgagcagctttgccacgcaggaacgccttgttccgcactgggagcacgagttgacggcgcgtgagtttcaaagcaccagcccaaacgtctgggaaaataattaatacctgttgttctgcccctgctgacctgttgtgcgttcacagcccctgttcgcctgttggccacactgtttagctgttacagatcaacagtgaagcagtgtcgatctggagagagagatgcagcaacacggcatcgcctaggacaacagcatcggcagtttagagcacagcgaggatgcgcagggcttcagtagaagtcgcatgaagacgtctggtagcccccgagaagtgtgcacagacctttttacatagtatggtgggcagtagcgaagtggccgaatgcatgcacaaacttcggcgacctgtgggtattctacttttgtgtgttttggttgttttggggttctgaatcattgctctcacttacaaacaagactacatgtaaaacaacagataataattatcacccaaacgtctggtggaattcctgtacaaccttcacgtaagtctccacatcttgagccgtcgcagcatcttggggcatgcacacctccgtcagcctcacgatgtgaatacccgagcgagcaaacgcctccgcaaactcgaccggcagtcgtgggtgcgtcctgccgcgtacattcactcggcacttgtactgagatccaccaggaagtcagcgacgtcttggggcggacgaagcttaagcctttgaagtgcttcaccacttgcgctcgagggccatggtacagcacctcactgtcgttcagtagcaggacgtcatcgaagagagcaaaaacctcaggggaaggctgcagtagtgaaatgaccactgccttgtggcaggtcttggggcgatgctgcgctacctgctgatgatgtcgcaggtagctgcgctgtccagccccgtgctggtctgaagtgccgttgtaggtgacttcgtcctcgaacaccacgttcttgttcatgggaactgaccgctcagcaccctcaggagcgccgacttgactggtccaggctgacccagcacgagcgtcattgtgcccgcgttgaagacgccactgatgcccttgaggatctgctgacgcaccaccgtctccttcgtgcagccaggcacgatcaccgatatgaattctgataccatcgaatatcgattaacaagattttccgtctcacatctccagtgtctatgtagtgttgtaaactcactgaaattattcctccacatgaggacaggccaaatgaaattccttggatccttttctctcggtagtgacgtcataattcactgtgcagtgcattctttagtagagacggcgacactttgctcctgactcgaacaaatcttgtcggacgccccgcctcgctatcatcaccgcccaaatttcgatcgaaaaagctcacgatacctgtcgtacaaaatctttcactgcatggttggacactctgccctgacacaattcctatggcaatcatatcaatggtcgggactgtaatccagtacagttttcgcagaaccagcaactccgtgccgtcctcttcctccacctttagcaatccgaacgccttcagagcttctaccttgtagaacagcgtaccattctcccagcggtagcctcccaacatagtcattttgttgcgcatactgagggtattgtccacgcagcacggagccgtgaaaatggcccaagagcagccatgtttccagcgcacatagctaacagctcgtaatatccgtatcgacatgatgaatccgatgagaaccagcacgaaaacgccgtgacccaccaagctccagacgtagtaggacgcagctttagcggtagaaccagagttcttaagctccgatctattgagcgctgtgagaaaatgaggctggcatattgcgctcagcagctctccgattaatgccgactcgtagctgagtagtaacctcttgataaacaatcgagagctctcgcgcatccaccccatgttctccaggagctcgaacagtagcagaagcacaccagataagttgtatcccagtgaaatatactggacccaggcgaaaactccatcgttggcgacgagtaggaacagatcgctcatgagaccttccgctaggagatagagtaacaccaaccgactgtagttcgacgctccgtgggccgatagccgcaagttttcatgcacgaagaccgttgccgactgtcgagtgagtttttcctccatttggtcacaccttcgcccgtgccgcttgcacgcaatatacttctaagtagctccgccgtagtacgagccccccaaacagtaaccacgccgtaccaacagagcagtaccagtacgaccaccggtacccctcactcccagcgtcgtttgccaagttgtagccgttcaaatcgtacgttccgagtccgcctacgagtccatacaccgttttatcgatagagcagtaggtaccagccacttcttcataaaaggaatagtatccgatactaccatggtagaagtacaactccacagcgtagctgtcactcacgcagttagttggtgtcgtggggaatggctcaactttgctgtctccgattaaataattcccatggacattgtactgcggcacgacaaagtggcagagtagcccgtggtcgacgagatagaagtgcgtaatgtcgatattccaccagacttgcgccatttgcatgcctttagcagagcaaacgtgcgataaattcgttgcatttctctccgttcctgctggagggaccagcgtctcagtgatcttgtgaggggttgcgaattgcaggaaactccgcgtctggagaataaatggcacaactccaaccacgaaccaggcgaccagcaacacccgatgtgcagtcattacggtaccgcttgtagagaccgcgcaggcatcttgaaggggggtcaccttcctctgctccatctcggtaagttttggcttgaagcagcgtatatatagctaccgtgtagtcaacagccagcatcttcgccacaatttgtcgagctaccatcagagcacgcggtaagatccttatgattctgctagggcggataaaggagtgccaggaagaacatcactgcacctatcggctcattgctttagttgaacctggtctacctgagccaaaagatgaacggagatcgtgcatcttaaagtggaatgtgcacttaagtctacgacggcctatcattagcggacgcatccgtttgctgtggttctggaaaccattttggtatacaaccaccccgcaacggcaagtattcttgttttgctcacggttctcaagagtgtgttgagtgaagctgcacgaacatgaagcctattcgagttcacagcatcgtcggctactcccaagaccggcaatcgacaccttcacgccgccgactaactgcgcagcgtaccctaatagcagcttggttttgcgtgggcatgctaccgcttctactacaaattcggagctacctcaagttcatgacgccgcacaaaatctccgagactctcgtggtgccacctgataaggaaggagagacggcggatctagagttacgctgtccaatggaggagctgtatatgggagaatatttttatctgttgctaatttactggttcatctgttgcgggcaaatcagcggaaaatctgttgcccgtgtcggtttatctgttgcgtgtgtaggggacgaaagcaacaggttttcagtacgggaatcctgcaacagattagatgtcgagttgactcggtatatctgttgcctatgtgagtacttgttgtgctcatgcatcgagtaagagcacccccgctattgctcaggaaggtgatgcatgaacttgtggtattccatttcggggactatggcgagctcagcggtctgctacggatttattcttcgatagtcattccttaactttgcaagcagcttgagttattgttgcatccagatgatagcttgccgttccccttagaggccaacgaggactgtgacttctggcgcaggcgtgctacgacatcagcagcacaggtatggcaagtcaacgtcgccacgggtgcgctcttgacgtccaagcctatcgcgaagagtgtgtgacctattttaaagcgcatgaggtgctactggaccaattggtgccagggatgagttacagcttcttcagtgtttccaaggatttaacagcagaccacgcgcttacgggtcgatccacgaggtgaaggatcactgcggtgaggtcacgttgtcctcctgagtcataacgatcagagcggtcataacgacccccatagccatcatcacaggaagaacggccttggtcgtaagagcggtagccctgagggtcgaatttgtcatagccatagccccaattgtagtaatgagagccgttgtgtccgtggtagccccgatcgcgcgcgtacttaagtatgcgtgaagtcatcggacggaggtgtcgactcacgtccgctgggtagtacgatgtagtgcacgtggccactgagagtgacattaacggaacaatgcattaacacgagcatccgtcggccacgccgacaacagcttcggagctgcgagtggctacagtaccgtagatgtcaccgctgcccttcgtctaagttacggggttgcacgatgtagttcactccagtctgcgggactttaggatctgctctcgtcatccactgtcgctctcgatctccatactctctttatccgcatagatttttgtttgagctaaaactcatattacagcgccaaacggttgagtgcgcttgctactggactgcaggcagcatccaggagaccgtctccatgatcactgggttcgatgaggaagcgaagtacgacttgtactaccgagtacttcggcgtgtttggagcgtgggcacaacagactatggcgactcgtactcatggactggacttcctccgggtgcttcctgaggtagtagagtgcaaagctaccccctcgtgcgaagagcgtgggcactagacagtgagtccttcagtactatgtattcgcgacgtgtacaagctcgcacaggggcaaatgccttggcggctacataacaacgagcgaagaagagctattggagaccacgcaactattatttatcttagtcacatccacaggtaagcaagctcatctcgcgttcatgtgtacaggtgaacgtggcccaaccatctaaatcaagatccagcgcaatccaaacttggcctagtccgaggcggatcacaagtccgtgcccgaagaggggttgcctgcaccagagcaacagtaattcgagtaagaagcagtgcatgtagagcgagacgcaatagatccgatgcctgaagacgttgaggtgatgcgggactgtacaggagccgacgccagacgcggaaaatgtgcagcgtagcatcttttggagctggaggacggtgttatgaccttcaagtaataaatttactgctatgaccatcctactttcacatagccttcgcgaaattcatgcgagccctttaaaagaatcctatcaagcatcgaccgccttcggataaatagcgggggtgctcttactcgatgcataagcacaacaagtactcacataggcaacagatataccgagtcaactcgacatgtaatctgttgcaggatttccgtacagaaaacctgttgctttcgtcccctacaccacgcaacagataaaccgactcgggcaacagattttccgctgatttgcccgcaacagatgatccagtaaattagcaacagataataattactccccgctgtatatcgctcatgttcactggaacgttgaggcgattcactacttcgagatggagcacgggaggctgtgtcacttcgttatcccccagtacaatattcacgggaattatctaccgcgctcgataaagtctcagccatccgcaacaacaccctccgactgtgctaacgatagctacccgctggaatattacttttatcacggtagtatcgggtgctacgcgttctacgaggaagcggaggggacatactgcgccctggacaaggccgcgtatgtgcgagtacgtggactcggtacctatgacagcaatggatcgaatttggttcacgacactggagacgacagctatcgaaagtcgtattggtacagcattttctgtggaatttggctggtgtatcgaacagtccaaatgcggccgaaggtgcgattttacgggggaaccggtttgccagagagttgcggtggtctacgcgcaagaaaatatgcgcctgacagcccacggagcgacgaattatcatcgagcagtcatgctttacctactcattgaaggcctaatgagcgacttgttcatgctgatagcgcaagatggcatcctcgtcaagatccaatacatttccctgggctacaacctttcgggtttgcttttgctggtgtacgagatgattgagaacatgaaatggctgtccgagagatggaaggtgttctttaagcgcctgttattctgctacgagtcgtcaatgctcggagaactgctaagtgtggtcgcactgcatcactacatcacgacactcaatcgatctcgtctgagcgactcgaagtccacggctgtagctgtgtattactatgtctggagcctagtaggccatgggtttatcgtactgggtctagtggcatacatcatctgcattcgggcactctgggcattcgtatacgtgtcttggaagcatcagacactcgcagtgttctttgcgccgtgctgtgtcgacaccacgttagctttgccaaataaaatgacgatgcttggaggctacctttatgaagatgagaagctgtactacactacagaagcgctgaaggcttttggactgctcaagatgaaggaaggggatggagcggagtttgtggtgctgcgtaaaatccactggctcgaggttccgacggataatctgttcgttatcggctttgttgctggtgaaacgatgggagtgtgtgccgagagaccttgcactggaatcgtgagcttcttcgaccaggttattggaggcgattctgcgcaaacggaaaatcatcgatctctttttattcgcgtgcgaaacaaagtagcagcagatccaaagtcgttgaatgtactaccatcgtcataggccggcatcggcgaattcatttttaacagaagacggcgccaaaaattgtcaagtcgagcaggcgcatccgtttcagcagcaaccactgaacagcacgacgcaagcatgaaggggagccaagatcgtcaagaaacacggcgcactcctgtgtcaataatcccatcggcgtctcaaatcgctcggtgtatcacatcctctcgcttattgatggcggcttgggccttcctgggactggcgcctttcatcctgcagctgtgaagctactgcaaattcgtgacgccgcacaagatcacggagattatcgtgatccagccaggtgtggagaaacaaatcgcaaacttgacgcagatttgccccctcgagggcatttacctgggccaagtgtggtggaatattcagttcacgcactactacgatctcccacgaggattggtttgccatttcgtcgtcccgcagtacaatattcacgggaatctgttgattgggacaacgaaggtgccgccattttatacgagcccaggtggatgtactgatgacagctattcgatggaaatgtacttctaccacggcagttttgggtacttttccttctacgaagagtgcgcaggcacttattgtaccagcgacaagaccgcgtacctcgctgcaaaaggtcttggcacgtatgacatgaacggctctgatctcgtggaagacttggggagcactgactatcgcaaatcttactggtacggcgcgattgggggcatttgggtcatataccggggtctagtgctgcttcggagcttcattttgtgcagccgatacgggcgaagatgcgacaaaatgggcgtcgggcttagaagaaaagaagcggtggtgcttatccacgagcaactgcgtctcacagcgcacgacgcgacgagaactcatcgagttttgctgctttatctgctgatcgaagggctcatgagtgacacttttcttctggtctcgaacaacggcttcttctccaagatccagtacgtctcgctcggctacaatttatcgggaatgctgctgctggtgttcaagatcattgaaagcacttattggttgcgtgagaagacgcgggtgtttattaagcggcttttgtcctcctacgagtcttcccttcttggagaaatcccgggggcggcacttcagcaaactttcttcacgcatatcaaccagacatgcatgttcaaggcttccaaccacgttagtctggccgtctctcactatatctggagcatcgcaggccacggaagctttgttctattcgctattggattcatcatgtcagtgcgagcactgtcggcagttctgtacgtctggtggacgcaccgaactatgagcattttctcggcttcgtgctgtgttgacactgtacttggacgacgcaataaaatgacgatgctagcgggctatcgttgggtagatgagaaattgtagtacgcaccgcaagcgcttaaatcctttggactcttcaagatggagaaagaggacggaggcgagttcatggcgctacggaagttgcattggttctcagtaccgaggaatgattttcttgttattggaaaggtgtatggagatcgcgttcagccttgcatcgcgcatccttgcgtcggcgtagtaagtttcttcgctgagagcttaggaggtgaagcggatgaaggacccccgagcccgtataggcgctttctacgagtaaatagccagattgtcccgagtgtaggagactcaatcaatatttttccgcaggcgtaatcaagggcattatttgtcgtgcatgttgctgctaaatatcgatgacaggatctgcttcatcgtctggcgttaccgcccatgtgcatttctgaaaatcgctgtgtgcactactctaacctgacaagtatgttagccaaattcgctatatacaacacttcaaagtcttaataaccaagattttcagaacgatagtgcttgctagatacctatagtggaaattctacaggtacaataagaaatacttgaagtactcaaaaggtcgatggtaaagtctcgaatctcaactagggctccgcgaaggctgggataggagaattttggtataaaccccttctttttatttttcattatttttattagctacggtcatctcctgcgcctgcttcgcagccgcagcatctgcccggatatttgccagttcaaactgtctaccggcaatgctttacaaaattaaaaatgcgaaccttggttgatatctgtttagagcttgtagaaaatgcaaatgcttactgggatgccaaccatcatgctggtggtggtcgttgtctactttgcggccgtcgaagctctcagaaaaccctccagttcgaaggtcactgttgccgcgtacaacagcgtcggcgaagcgagacgactcctgagatcacgtgaatccgcagctctgggcgataacaatgactccggccggaatccagaggagagaagcacagatgcgaagtgggtctcgatgcttgctcaactggaccaaccgactgggtggatacaaaaatgggaaaaatgggacttgaacctggccgtgaagctatggatcaaaatcaactagtacccttcggaggcattgaagtatgtcaatcgctacaagacttggaccaagtttgatcacagcaagagaacgatccagtggttcagatttatgaaggcgtaccgagccaagaatggagagggccgctttacggatggtgacatctaccgtttgttgggccctgacgcgtcggaaatcccattggcagttgccttggaatcgctgaaacaaattccggatctgaagagtcttgctgaaggcgtgcagttttatcagttcaagcaatggttcaaagagaaagtactaacccccaccgttgtcgaggagctgctgaagaggtccggggtggtaacggagcacggcgcaacggaagcaattgtaaggcagtacacgaattattggcaggcgtggcagaagatggcgacaagaagcgttccctagacgaaattaagttccgtgatctgtgatctttctcattgttgagcggctaaactcgcagtttctcacatgtacttcagtaaatattaaaatgctgcgaccagtgccgatttgtaccatgtagcaatagctacgctattccccggttcaacgggtgtagacctacagttcttccccgaggaacacccgcttgcagcatgagtctgcacggttacacaacgaccctaagtgctcggcattaaaatcgattgcacgcgtgactactgtagccagcgcactgtttctcaactgtactattaattgatattgtttccctccctttagcagcatcttcattattactttcctcggagatttttgaatcgcttgggctcgtacagaaagcggtgacgagttcgtcgcagtacagtcgtacagtattggctgccactatcaagaaataactatactacacaagattttaggcacggtgattaaaatacgaatatcgtaatctggccgcaccaagcatctatacaggctcgaagcttctccatccgcttcaggttttagtgaagtgaaacaaacgatgccgatacacggatttatgatacaagtgtgaacgcgagatccataaccctctccaataagcagaatgctgactccgtgtcgacttggacttacttaggtatgtatgcttggatgaatcctccagttcaaaattcatctgccaatagatgttcacaaatacttgacattgtattcttacacaaactcgcttgccagtacacaacttcggcataacctacagccaattttggttattttactggcaggttcagcgctaaaggtattcgaaccagagtatcccaggtccttaaaacgatgttgggtgatcatccgtagtgctttaaggtttatattctggtgaaagccagcgatggagccgctaaacattagactagaggcatactatagctgctaattggaaagagagcccatcatctgtggaatcctgcacacattgttgacaatacgcatagccaggctttagcaaatgaatctgtctccgttttcctgctaacaaaacgtgttgaaactactttaagtaaagaaaatgtgtggagatccgtttagcgatcattgctagaagatatccaactcaaaaattctccttgcaccggcgttttatgggtgttgcgacactgttgggcagatccctatatattagatcgacccgctacggcttgcattctgggatagtacatgtagtccacgagtattgtacatgaacacgtaagctaggctcaagttagcaattttctcaaatcatccaaaacaaccgtaacttgagacgtaagtatttttttttacaaactcgaacgcgaatgcgaatgggcttgccgattgttgctcgctatctttttgctctatcgagaatgataaagtgtacctgcgccgcattcataagttattagcagtgctgctgtggttttaacgctcagattcccaaccaccgtaacataagttctagctctcgatgacgactaagccgtgctaaagcacggagaagctctggattttatcatgtagttttgattctaggtttgattctaagttaatttatcttaaatgtgcctagcagttctgcccgaggttctttggttagagcgaagtatccttaaatttcagcagttggtgcttttgtctttattcgggtttgctaccaagttccgaaaccatgaaagcatgcactgccaactttctcaagcccttacgcaagcatgtactggtcactcgctatgccttagctatcttgcaataatatgcagccaacgtcaaggcttgaatgcggcggtaacggtacgtatgcacgtgcagaatcgttgaaacgagaccagcatcgtttgaagacttcaacgacactcacgactttaaattgaagtcgtgggtgttcgtgggtgtcgttccatgacttgaacgtggcgacatcgatttaacatcgttgaacatacatgtactgcaaacacatgtttggagtcatggtcgagcgacattcgatcgatcgtgtcacgcgaatgtcgaccctaaaagactcgagcaacacgccgctggataatatattatccaagcgtttattaaagttaacgggtacgttccgatacgttaatgattcgttcgtttataaccgatagcggagcttgcatttttatagtgatttgcacctgcagtcgtatcgccctaataactctgggtaaaatccagagaacatttgcaagaccgcatcagtactacattgtgtgcattattgaagtcagaactgcccgcatatgtaccagaaacaagctgatgattcaatgcaggatggggttccacggaggagcacaaagtattttgaaattgcaagcgaatccacttcggcgtttggacctcatttccggttttagcgtcaagaaccaagcctggcgcgctcaagcgccagaaacgatgaggatgcacagaccacttcaaaagtgggaaaattttgaaaattcccacatttcccacttcctggcaaattgagagcccgataccatctctaataacgccccacatgcggtgggaacaaatattagtagcattcccacctttgagctgtatccatctttggaatatcagtgttaatgtattggttcccccttcccacatcctgtctccagaataggtcacttcctaatagaatgtggaaaaagtgacttgtcccactttttaagtggtctgaggatgcagaatatcatgctggtggtcgttgtctactttgcggccgtcgaagctctcgaaatcccgaccggaccgaagatcacggttcccacgcacaacagtgtgggcgaagcgagacgacttctgagatctcgtgaagctgcagctctggacaacacggacaatgaatccagcccggattccgacgagaggggcccaggtgctacgtggctctcgaggcttgctcaactggaccaagaccaaccaagacttaagtctatgcagaccgtgaatcattggatcatagacaaatggcgcccgtcggacgtgtttgagcatgtcaagcgctttaagggctgggtcacctttgacagcaacgtaaacaacctctccatcagcccaaaagggcgatccgttttcgattccaggcgttactggttacatccacttcagaattaagtttagctgcgtctactactagcaggatggtgaagcaggcaatggtccactgcggcgccggaggatccctccctcatcgactaccgccaccccgacagagtcgtatcttgacagcacagcataaattactgctcgtatggctgtttgctggcgtcgttccgtttgtcctgcagacgcgcagctacctcaagttcgtcacgccgcacaagataacccaaagcctcatcgtacctccaaacatcgagaaggagactgcaaatctgacggagctttgccctgtccaagcgctgatcctgtccggagtttggtggaacgtccagtcgacgcactattacgtggtcggcagcaaacgcctctgtcatttcgtcgcgccgcagtacaacacgcacgggaatgatctgattggagtctccaagatcgcaccgtacgccaccactccagccagttgcgccgacgacagctacaagttcgaccagtacttttaccacgggagtatcgggtactattccttctacgaagagcagtccgggacgtactgcaagagagacaacacagtttacatccgaggcaacggtctcggatcatttgataccaatggcccaccccttgctgaagacactgggagcgaagggtaccgccattcgtattattatggactcgttggctctatatggatcacgtatcgagctctggtactacgaagaagctttatttcgtgcaaacgccacggccgaagatgcgatgaattgggcgagagtcttacgcgaaaagaagccgtaatttttgtccaagaaaatctacggctttcggctcacggtgccacgatataccaccggattgcccttgtgtacctgctggttgaagggatgatgacggatctgttcctgctcgtcgcaaacgaggggatcttagccaaggtgcagtatatgtcgctgggctacaacctgtctggatttttattggtggtcttcgaggtcattgagagcaccaaatgcttgaaggagagacaccgattatttttcaagcgcttatggttcagctacgagaccgcgttactgggggagctgctgagcgcagccttgcaggagcaaatgatcactgcgataaaccgttcgagtctactggaacggtcaaagtccacggcgatcgcagtgtcctactacttctggagcctggtaggccacggcatcttcatcctagcgcttgtgggttttgtcatgacggctcgaactatttgggctgtggggtacgtttggtcgcggtatggtcgcaactcgtgggcgattttcaccgagccgtgcagtgttgactctaccctgaagctacgcaacaagatgacgtcgctgggcggctatcggctggacaatgggaggctgtactaccgagcggacgcgttaaaagccttcgggttgcttaaacttgaggacaaaggtggcaccgagtatctcatacttcagaagcagtactggctggggacaagtagagataatttgttcgtgatcgggatcatcttgggccaaagtgtggagccatgtgacgagcgcccgtgcaccggtgaagtaactttttttgattgtagattaggaggaactctcgatggattttgtagtcgtcgaccactctacattcaagtaagaacagcctcgactgaaacaacagcaattagtgagccctaaaccgtaattttcatcatcaaaaacgattttgaagggaaaaataccatgttgggctttcagtttcgctttcatttctggaatagattgtcttctacgcttacagacactacgctcacacacaacaagaacgaaacccgtgatgaaaaagaccaaagtccattgcggcaatggcatctcgccccacgaggttgcagcggaaggaaggtattgaggaacgcctgtgttgttgatggcaaatgccgaagtgagttgattaaagttaccaaagttgtcctacttgtccttctcaactctactcccctcttctccttcttgttgtcctcttgtgtctgcttgtgcaatcaccgcttgctgcacagtcgagccaaccaagttgaccatcccgaagattagtcaataggaagcgttccaggacggttcagggtgaaccgtgccaacggttcaggtacggagcggaaccgtacttaacggtgcacttcaacactcccactcaccgctacggtacggtgaccttctccttgatcccgctagcgtcccgcaagtgcttgagcgtcttcgtcccgagcgccttcgtcagcatgtccgccagttgctgcttcgtctcgacgtagtccaccttgaccgttccgcgttccacgttctcgcggatgaagtggtgtcgaatgtccacatgcttcgtcctagcatggtacccagcgttctgggtcagcgcgatcgctccttggttgtcatcccaaagctgcgtcgcgtccacttgttccttgcccacgtccttcagcatcgcacgcgtccagagtacctcctgcacgcacaggctcagtgccatgtactcagcttccgcagagctgagcgcaaccgttctctggaacttggacttgaacactacgggatcgttcccgatcatcaccatgactcacgacacggaacgcctgtcgtcaatgttgcttctccaatcgacgtccgtgaacgcttcaaccgtgatgctgtcgtcgccaccttggtacacgataccgtactcccgggttgtcttcaagtagcgtagcacgcgaatggcagctcgccaatgctgcagaccggggttctccaggaatcgcgacaactgggtcaccacgtacgcgatgtccggtctggtgcatgtcctgatgtacagcagacatccgatcagggaacggtacggccgtgacttcatctcagtacgatcttcatccgttccgggcgactgcatcttagtcagcttcaggcccgacgtgcacggcttgtccacaggcttagcgttccgctggccgaaccgttccgccacgtcgtcaatgtacctcgtctgcttgatcatgagcgtccgagcgttcttgttgtgatcaatctccatacccaagatgaacttcgccgtgccgagctccttcatctttaacgcgttcttcaatgcgttcttcacctcatgaacctcaccactcgtcttcgcagcgatgatcatgtcgtcgatgtacagacacacgtaaatgaagccgttcctggaacgcttgacgtagacacactggtccgccccgcagctcttgaaaccgttccccaagaacacgaggtggatggtcttgttccacgcactggccgcctgcttcaggccgtagatagccgtgttcagctggcacacgtagttcgcagcgttctcaataccaaatggcacctccatgtacacacggtccgtcagctcactgttcaggtacgctgtgtccgcgtccaactgctccatcacgtatgcgtctgccacgcacactgccagcacgacccggatcgaattcatgttcgcgaccggggagtacgtctcgaaaaagtcgacaccgtacttctgcttgaaacccttcgcaaccaaccgtgccttgtaccggatcacgcgaccgttctcgtcacgcttcttggcaaacacccaccggctaccaatcgtacgcgtatgcgttccacgtcgtaccagcgtccacgttccgttcgtgcgagagcaactccgtgtccattgcatcccgccaggcatctgcgtcttcgctagcaatggcctgcgcatacgttgccgggacatccgttccatcgtcgatcctggccacgtacgccagtaaagcctccgcaatgagaccgtcctcgtcgatcctgggtcgcttcggggacggcggcccatcactcccttccgacttgcgttcctcgccattttcatcgtcaccgttctccaagagaaacaccggttcacgggatcttcttgtccgttccggctcggggtggaacaccaggtggtcatcctggaacgcttgaggtggaggccggtacgcagtcaactccaatccagtggtagctgggcgttccggtgccggcagccgcagtacctcctgctctggctcagcctcatccatctcgacgtctggaacgggttcctcaacagcttccatgggttcgtcctcgaccggttgccgttccacctcgataggaacggttggcacatctccgtccttggtcacatggatgaccgttccatgctgcggcgagtgcgtatcatagattccgcccacctcgcgctcgtccatcttgaccgaccgtgacaccttgaccttggacgcatccatctcgtatacacggtaccccttagcgttctccgcatacccgaggaacatgcacctaaagctcttgggctcgagcttcgtcctcttcgcattgtcaatgtgagcgtaccccggtgagccgaacacacgcaggtgatccatccgtggattcaccttgaagctgacctcgtacggcgtcacatccgagcgttccgtgttcgtggaacggttgatcaggtacaccgccgtgctcacagcctccgcccaccattccgtcgacacgcccttgtagtgtaacatactgcgtgccttctccatgatcgtccggttcatgcgttccgcaactccgttctgctgcgggctgtagggcaccgttcgctgatgcatgataccgttccggtgacagagatccgtgaccgtcttgttcacgaactccgttccattgtccgagcgcaggcacttcaagcgttctccccattggttctcgtagaacgccttgaactccttcagcttgtcggccacttcgctcttcttcttcatgaagtacgccacgacataccttgagtagtcgtccacgaacgtcagcacgtacttcgcaccacccttggagaccgttctcatcggccccatcacatccgtgtggactagttccaacacacgcgatgtcttcgtcgtcgaccgtgccgggaacgatgtcacggtctgcttccccttcatgcatccgccgcacaagatcttggtgctacgccccacggttggcaaaccgttcgtagcacgctgagttttggccataccgttctcgctcgggtgccccatgcgagggtgccaaagctcccactgactatcagccccggcgtattccacgaaccgtgtcgactcctgctcgcagtcgagcacatacgccttgccaatcttcttgcccatcgcgaccgcgctggcgttcccccagatgacacacgaggaacgctggaactcaacgctcagaccgcgttccgcaagcttccctaccgacagcaaccgtctgtcgagtcccggaatgtacagcacgtccttcattgtgatgcgtttcccatccatcccggtcagcttgaccgttcctcgcccgacgaccggcagctgctttccgtcggcgatagtcacgggcatgccagtgaccgttacatccatttcaaagaggtcatcacgatgcggggtcatatgggatgacgccccgctatcgatcagccacccggcgaggcgttcctcacccacggcgaacacggtgtcgttcccagcgctaccgttcttgcccgggcagtcccgcttcatgtggcccacctggtcgcactgaaagcacttgcccttgaaggcaccgttcttcttcggaccgttccccttgcgaccgtttcctcgaccgcccttgaaccggccagcgttcccgttggcgcggaacgctttctccgtagtggtatccttcttctcgagccgttcaaactccttcaacagcttctccttcacgtcgttcaacgtgacatccttggcgttctccaggatggacgcgatcagctcgtactccgacgataggctactcagcagcaccacgagctgccgtgcctcgtcgaccggttctcctatcgtctgcagcccaacgatcagttcgtcgaacgcgtccagatgcttggccatcgacgttccagagtccatcttgaactcgtgcagacgcctggtcatggcgacacggttgtgtagcgtggcacggttgtagtactccctcagagtgttccacgcctgcatggcacgcgtcgcgggacggatcttcgtctggtgctggatctccacaccctgcgcgatgatgcccaacgccttcgcgtcgttcacgagccacgcctccgtaatctcattctccgccttgacgacctccacatgcgcaagcagccccttccgggccagcgtcatgcgcatgttgtactcccagtggaagtagttcccactgcccaggaggacttcggcgcgcttggtcgtcatgtcttgagcggagcgttcttggtcgagcgttcttgcggcgagcgtccttgcggctgttaacctattgaggaacgcctgtgttgttgatggcaaatgccgaagtgagttgattaaagttaccaaagctgtcctacttgtccttctcaactctactcccctcttctccttcttgttgtcctcttgtgtctgcttgtgcaatcaccgcttgctgcacagtcgagccaaccaagttgaccatcccgaagattagtcaataggaagcgttccaggacggttcagggtgaaccgtgccaacggttcaggtacggagcggaaccgtacttagcggtgcacttcaacagaaggcctcgcggcgttttgacggtccggcacaagttacttatcgcgtgggttatcgcgggggtgctgccgtttattctccagttccgaagctacttgagatttgcgatgccgcacaaaatcacccagaggctggtggtgccgcccggtttggagaaggagggagctaacctaactgaaccctgtcctgtcgaaggtgcgctcttgtccggtacttggttcaacctccacccgacccactatttctccactttgcgcggtcgactgtgccactttgtcataccgcagtataatgtccacggcaactctgttatcaggaacgcaacaactgaggcgtactacacgacgcctcgtagttgtataaacgatagtctctcctacgaacagtacttttatcacggcagcattggctacttcgcgttttacgaggagcaagttggcagctactgtacgagtgatcaaaccgcatacattgttggtcagggggttggctcctttgatatcaatggacgattactggtcgacgatacaggaagccgaagctaccgcagctcgtattggtatagtcttggcggtgcgatttggctcacttatcgagggtttgtgctgcgacgatgctttgtttcgtgcaagcggtatggccggctttgtgacgaaatacacgaaggtctcaaccgaaaagaagccatggtgtttgttcaagagcatctacggcttgcggctcacggggccaccaattatcaccgcgcagtggtgttgtatttgctgattgaaggaatcatgaccgacttgttcctgctcgttgcaaacgatgggcttctggcgaaggtgcaatacgtttcgctgggctacaacttgtctgcactcctcttgctgctgttcgagatcattgaaacgacgaggtggttggccgagaagtggcgggtgcgcgtcaagagactcctcttcagctacgaaaccgcgtttgtcggcgaggtgctcacggctgtgtttcagcagtattcttttacgctcttgaatcgatcggattttcggaaatcccatccagcagcgttagcagtatcgtactatgcgtggagtttggtaggtcacggtgcttttgtgctcactattattgcactagtgatatccgtacgagcactgtgggcgttggcttatgtctggttaaaccatcacacgtgggctgtcttcactgcaccgtgttgcgtcgattcaccattaaagctacgcaacaaaatgttcttgctgggtggatatcggtacgagaatggcagactttactacactacgagtgcgttgaaagcgttcgggttgcttcaagcgggggaggacgacggaacggagttcctggtgttgcggaaaattcactggttcagggtcttaaaagacgacttggtcgcgatcgcaactatatcgaaccaccacgtagaaccgttccccgaacgcccttgcacggggatcgtcagattttgggatcgaagattgggaggcccttctgttctgactggaagtcggcactcaatctacatccacgtaaggaatcacgcgagccatccaactgtgagattatcgtgacaacgtcaagtcaaacgtagcctttggggtggattcggctttggttcgatcattgcgcaaatagccgagtcagcgactagctcaatcttggaaagtgggtggcacagagactacaatttcaatagttagtgtcttttgttgtagacttcaaccgcactctgaggatatcacttcatttcgatttcctaatattgccgagatgaacgagttagtacagcaaaacacaagtcaatttaattcaataaaataaaatacagcaaaacgcaactcagcaaaacaaaaaacgcccaaagtcgtgtcataatgaactggggtgtgcacccgcccgggtgcacaatgggctcgttggcaagtttgacggagagctccacaaatgttgccagctcgtctttgaacatgcaacgcaccaagttcatgcccatttgttgacaatggtcgatcactcggaatcatcgggatgctcctccatcttcgccttgaaatggcgcgtgacaactgcttcttcatacactttcggtgtctctccgcgctttgtctcgaggctgaagaattcgtacacatgctggacggtatcttcgctttcatcccacaacacctcgtcgagcttcgctcccccgatcccaccaaggaccccacccactacgcccccagcaataccaccgagcacgacagcccagccaaccgggttgctggccaagaccagacaaagtgctgggacaccggcgcctccgattaatcctccggcgctacccgcgagattcgacgccatccgtttgcgctgctcgatgcttgtgattttcccacgcggacgcagtgtcacgtcacggactagcgacagcccagataccatgacactgacagcaccaccggcacgaaacagtgaagtcgaaccaaaggtgcctcggcaagccggctggtcaccacgcccgtgaatcctccagcacccccgatgaccgtcttgacgccaatgttttcaacaatgtccccggcagttcggcccttcgtgttgtctcggcactcgctgacaatggcaagccccagacttatgactacaccaacagcggtccctttacccagctgcatcttaagcgcgcgcacgttggcgagatattccctctcctgctgttccatggcggcgaggaatctgtcacgcgcggcgttaaaatacgagttcgggttgcccgcggggttgagaagcgttcggtcaggggtgccagtgacaacacctcggactttcatggggctgtttcctatgatctccatcctcacgagtcgctgggttgcatcaatgcaacctcgaccagttgtggtcgtacttgttctgagatccaccatgatgtcgttgatacttcggggatcttcgtagcgaggtcggtgaacgccgacgttcgcatgcagtacgcgtgctgtgccgtcgccttgcggtacaatgttgaactcgtggtcgccaccaccaccacgccactcgatctgcactacgcgtccttgtcgcaattggccttcaatgtacctggaatccagcccaagatcgccaccagtgccgcccctggggacagtgttgacgacgttggtcatgtaccctcgaagaatctcacagaaattgccacagctcgatctgtattggagggcttggcgcagagtcaattccactagtctggatgcgtcttgatatgatgaaagaataccatcagctgactcagttccgttgcggggatagcaaatggatctaccatggggaagtcgctggttcgcgggtgcaggttgaaaaatgagaagagcttctatattcattcagctcaaagcagaggtcggaaaaaatagtgcaatacaataaataatccgttttttaatattaatttttattattgggctacagtggtccccgtacaatattaaattggcccaattattgacaataaattccataaaagtgccttggctggactcctatagcttttgtacaaagcttcctgttgatggcgtcatctccagcctccgatgacatcaaaaacggcgttaaccacaccacatttcgcccaaggcaaatgactggcttggagacgtgctccaaccaactccgcagcctacaaatacggctccactggcagttcatatctccatttccacaggatagcaatggtcgccaacaagcaactcgccgccttcttctacacctcgcgtggccaaggcctcttcagctgcaacttatgtaacagcgtgcgcaaacagttggctgggtcaggttactccaatctggtggcacacctggcatcgaagcacgctggctacgaggcaacgtacgcatcgctccaggccagctcggaccgatctcttcaagggttcggcttcgtcgcagaggaagccaatcatctcttccaatgggtccgttggatcatcgaacgcaacattcccgtccacgaagtcgaagatgcactaactcgggccatcagcaagctccgacctgtgaccgccaaggccgtcaagaagtgcatggagggggtcgcaattgaagtcggcgagaagctggggaaagagatgggaacgctcttcactttaatgtttgacggctggacccacgctggcattcactatgttgctctctacgccgtctacgagacagctggtaagctgcgcataccgctacttggtatttctcccttgaagatggcgatcagacggcagacgcccacatcaagctgttcaagaacatcctggatgtgtacgacaagatcagcgacatggtggggtttctggtgggggacaactgcgcaactaaccagtccattgcaaccaagatgggtatccccctcgtcggctgcacagtcatcgtttcaacctggctgtgaacaagttcatggagccgtatggcgacttactggacgaagtcaacaaccttatggtggaacttcgtcatgaaaacaaccgtgccgagctgaagaagtacaccgatctcgtccctatcaagcggaacgttacgcgttggtcctcgacgtttacaatggtggagaggtacattcgtattcgcgcagagatcaggaaggtcgacgccgtggaggaaatggtcccaaccggcgggaagcaccggaagttggtcacgctgtttgagcacctcaagaagttcgagagcgtctgtaagcggcttcagcgcgaggacgccgatatgggagaggtatgcctgatgttcgactccctcatcgcggagtaccctgtcatgtcagagcatctgaagtcgaccgccaagatcgtccatacgcctgcattcgaatcgggtgctgtcaaggtcatctctggcacggctctatcgtccgcggagacagcagctttgaagcggttcgagcaggcacaacccacaggaaagaagtgcaaggagcgggaagaagactacgcgacgatgttgctccaaggcaagggaaagaagaggaaacaagcgccaagtaccacacgttacatgccgctcgtgaaaatggttcctccatcgtcaaacacggtcgaacggcttttctctcagtgcaagctggtattgacaccgcagcgtcgatctatgtttccggccaacttcgagcagctggcgtttctccgggtcaaccgcggcatgtgggacgtttccacagtagcccgagttagcaagcagcagggtagctaaactagcagaggcattgatagtggggagcgttctagctacataactcaataagaccatccctaacattgaagtttacactcctcatatttttagatttttttaaattatgccacgacactaatactgtattttcaatccaagtcaaatcgtagttatgtaaccaagtatgtccgcttttcaacgcaggtattcccagcctcgacagaggcatattgatgaagaagatgcatttcatatcgagcgtatgcctatcttgacctgtatccccctctaaaaagatatggtcggcctacctttgatgagtgtaaaaatatactgcttgaaatactcctacaatagctatccaattagcacgcacttcaacacacgtcgaccttagattcttggcttagctagctatgcacttgggaaaaacaaagatgccgaagaagggcaagaggctcaagcaaattgccgctctcgcggcagctaagcgggcactcgaccggcaggcacgccaccaagctgttccagcccctcttgaagttctccgacaagaagcgctgtcgacgccatggtgctgttcaggtccagccgtggacgagagtgatacgtcttcgttagaagacaactcatccgacttcggcgaaggtcccaatctctacacagtagacgcgatctacgcgaaaaaaaactaatccagcaggtgccgcttattattttgttggctgggtgggctatgcggagctaacatggcagcccgcagttgacctgcctcaagatctcatcagtgagtttgaacgtgctgagcttggtgtaagctggccggtcgattaccgacggtgattccaattggggttcctaccggcaccagtggcaggggtagacttgctaggcgcaccatataaattgcaatataaattgcgggaatttttattattgtttgctaagaaattgcagtttttatcagtgcttcgtgtcaggtgcaatccaatatgatactgtattggcggacctctggctcaaaggctgcacccattcagctcagcagctcctgagcagttacccgcccccaacttgcttcaatcaacttttttttactgattcaagcctcgcaaccggggatctttaacctagtttaagccgagcatgtgagaccatcagcctcgcttcgctccgcagaggaatttcccatttttaatgtgtcaatggttgtagtgcgtggtgggcttcatggaagccacactcctacatggaaccatcgccggtcgccccctggactatacacctggagtttggtagggggtctggagtttggtaaccttggaagtggatgacatagagttaatgttttttgtgtgaattggtggtcatgctgccgcactgggccgaacaattcgagaacctggtcgtttcacgggcatttcaggaatagatcagagtcaaatggcagcatcaagacacgattatctcacacacgacgagtatgaagaaggccaaagttcactgtagcaatgaagtctctccgcgtgatgttgctatggagagggggtccaatcgttttatgacggcgcagcacaagctactactggcgtggattcttgcaggcgtgatcccgttcgttctccagttccggagctacttaaaattcgcgacgccgcataaaatcactcagaggatcgtagtaccaccaggcttggagaaggtgacggacaacttaccccagttctgccctgttggtggcatgctcttgtccgggtcgtggttcaacatccacccaactcactacttctccaccccacaaggtcgactgtgccacttcgtcgtacctcagtttaatgtacacgggaccttcctcatccgaagcagaacatcagagccgtactacacgacgccaagcaactgcgtgaacgatagtttctcgtatgaccagtatttctaccacggcagtatcggcttttacgcgttttacgaggaacaaaagggcagctactgtagcatcgacaacacggcgtatatcgttggccaggggctcggaactttcgacatcaatggaccatcattagccgaagacaccgggagctacgactaccgcaagtcgtactggtattgcttcgcaggcgcgatttggcttacgtaccgagtattcgtgctgcggaggagcttcatttcgtgcatgcggcacggtcgaatgtgtgacgaaatgaacgaaagtctcaaccgaaaagaagtggttgtattcgtgcaagaacagctgcgtcttgctgcgcacggggcgacaaattaccatcgcgctgtggtactgtatttgctggttgaaggaatcatgaccgacttgttcctgctcatcgcgaacgacggaattttagcaaagattcagtacgtttcaatgggctacaatttaagtgcgctccttgtgatggtcttcgagatgtttgagagcactccttggttgcgcgagaagtggcgcgtgcggatcaagcgacttctcttcagctacgaaactgtgtttgtcggcgaagtaatcactgcagccctacaacagtactcgcttacgctcttgaatcggtcgaagctcaaggaatcgagaccagcagcactagcagtatcgtattatgcgtggagcttggtaggtcacggggtctttgtgctcactatcatagcactggtgatatcggtgcggacgctgtgggcgttgacgtatgtctggctgaatcagcacacttgggcgatcttcaccgccccatgctgcgtcgattctgccttgaaattacgcaacaaaatgttctcgctgggaggttataggttggaaaacggccgactttactacactacgagcgcgctgaaggcgtttggactgttgaaaatgacggaagaggacggtgccgagtttctcgttctgcgcaagatccattggcttaaagtttgtcgagacgacctgatcgttgttggaatgatatctagtcaccgcgttgagccgtgcgcggaacgtccttccgctggtgtcgttggcttttgtgacaggaagttgggtggagtaggcgagaatagtggaaatcgccaagcttcttatatccaagtgaggaataagcaggacgttcctcttggatcttaacgctatctcgtgttgtgcacaagtgatatgccccaccaagttcgtcaccgtcaatgcattttgtcgcgctcgagcccgcgcccgacaggtgacgagaagtctgcccaccccatttctccaccaagtcacataaaccacaggaaggtgtaccctgggtgagtcacccacaaatttaacggattcttccaattactaacggaatagtataccctgaaacagggtcatatagtacttggacaggttactacttaagtaatcggtagtagttcaacttaaattttgtaaacgtaatagtactatacgcattactatactatactacaccatttcccaggctagttgaaaagtttcccaagcaatgtgaaaatggctcgtccctggctagctctaattccatgctgtgtggcgccacacaatttttaatttcaggctacagtaataggcgaattgcatgaaaaaggcatttttcccaagacttgcaaatctgcccatcacccgtcccaagcaaagtgaacagactggtaaaatgcatatgacctcagatgttgcatacatgggtgcctgagcactaccctgcacgaacaacaccaaaagtggtcgaagctagctgaaacttagtcatccgctggaaatcattgtagtgagtggctgagagcagtttggggcgtgttcgcgtcttcgatcgccctttttgctggctattcacccatgtatgcaacatctgaggtcatatgcattttaccagtctgttcactttgcttgggacaggtgatgggcagatttgcaagtcttgggaaaaatgcctttttcatgcaattcgcctattactgtagcctgaaattaaaaattgtgtggcgccacacagcatggaattagagctagccggggacgagccgttttcacattgcttgggaaacttttcaactagcctgggaaatggtgtaggaccttgcctgatgtcttactattccgatgagtattattagttattaacagtaaaacacaaaagcccgccaaaaactggctgtacataaaacccgccagccactaaaatccgttaacttccatcacttttcaatctcacttccgcattccgcactcggaggatggaggaggcgtccgctccgacgcccgtggaggtgcgcgccacgggctcgtcgctaccggtgcttcgggagcgcgtgagcagcagcgacagcgacagcgacggcgacggagacgccgaactcccgcataaaaccccgcaaaccctccccaaaagtcccaaaagttccgctaaagccaacgttttactgctgccgcgcagctccagcctcggctacgagccccgcaggccgcaccaaggtagcagcgacccctgtctactagccgcgagcgacgacgaggagatcggcagtctggacgcgctggaatcaacctcaaagctgcagaatcacggccaggagccgctggacatccgcgtggacccgccgccgctgtccctggactcgttggactcgtcctcatccgcttcggggctggagctgctgtcgtccaccgagagggagtcgctgcagctcgtcaggagggagatcccgaggcctccgcgccgtccagagctcccagaagtcactacagcaagcgctacaggagaggaaggcggtggtggcgcctcctctgggccgcagaagaggagacaggtgccctacgcctgggtgctggccaaggtcggccagaagaccaggaggaagatcggagacatccggaactcgtacttcgccggctggctcgtggcctgctcactgttcgtcgtgctgctgaacgtctttgccattgtcattgtacaggtgacgtacaggcccgagagagaacctcgagatgaccctgagcagaggagggagtgcagacattggctcagactgctcatgaccatgcacttcctagggcttcccaacatcgtgctgattgcgcccgtggtgttcccgaacgacttcttttcgctgtatgcagccaaggacaagcggatgatccgacgaccgtatttgctgttctgtgagatgatcgtgacagctcagctgggttttatgatgtacgtggccgtgaaccagttactgaatgtgcccgtgattgtcgagtgccattcggagctacagccacggcagattgtactgttttactcggcgacggtggtttggctggtgctgctccgccagattgtggttttctgccggtttttgacgcatttgaagcttcaggcggatagttccaacgactcctcgcacacgtctgcatttggcaagtggtttatagcattgaaagcgctgccgcttaggagtgaacgtacccgactgaggaaggacttcaagaagctgctgtaccgtgccgtggcccgtggtgatgttctcacggtggagacacttctctctgagatgcagtcgaaatacaagattgaccgcattcaggacctgtacaacccgccggtgctgtggttttacgctttcgcaaagtcaaggaaaaacccgctgcatattgcagtcaagcgaggcaatatcaggattgtcgagttgctgctggagcgtgggatcgacgtcaacgtacttgacaaagtggtgcgcgtgaacttcaacgttgggctggtattcaaaattatcagtcgcatactggtacggtagaatgctctttaattatcggtatgtacacgaggtggatttactcacgttttccgtgtgttgcaggtacgaactcaagatggtctccgatcacctcttaaggcacttttgtgttcagtgttactccctccgctccacggtgcagttgcggaaggctacgttgatatcgttcgtctacttattaataagggagctgacgtgaatgcgctgcctcgggcatcgttctactacccagcagccgttctaccgcccatatttgtgaccgatgatcctcaggtgctgcgcttgctggtagcaaatggtgccaacttcctgaaagttgcctcggtatcactgacagggttggttaggacatacgcaacgccgttgcagcagagcacgttcacactgagatcagacttaagcgactatttgctggattgcggcggcgatgttgcgctgaccccgctccacgaggccgcagcgaccgacaacattgggaagatcaagtggctgctcgctcgtggtatccacgttgacacccttggcgagcgcgtggaaggtgtgcatcgtcgaacgccgttgcattgggccgcggttgtcggcaaggttcaagctgcgaaaatgttgcttgtgaaaggagcgaacccgaacgcaaaagatcgtgatggccgcacgccgttgcactgggcggctagaaacaatcaccacgaggtggtctccttgctgctcgcttacaacgccaaagcggatgctgaagatgatgagggtattccggttgtgtgtttcgctgcggaagctgaaggcgtcgactcgtccatattctccagtttggtggctgcaggggctagcctccgtacacaggtatcgggtggaaatacggcacttcacatcgcgctgcagcgtgagaacaggcagacggctgtgtcgctgatcaagtgcggatccagcatgatgatcacaaatgatgttggcaagcgagctgtggactgcacgacgtcaactgaattgcaatttttgctgaagaaagaggctggaactcgcaagatcatgatttcgtacacgcatacgcacgctcagtttgctcagaaagttcgcgaacacttggaaagccaggaacagcttacctgctggatggatacgatggacccaagcggtattggcggcggtgcagtttggcgagaggagattgcgcgtggtatcaacaactgctctctcgttcttagtatcgtgtgtgatggctacaccaagtctgagtggtgtctgaaggagctagcactcgccaagcagctccgcaaaccaggtactgttgatcgcattcgttgagtggaatttatttcgttcataagttaacactgctgttttgtgttatagttttaggcctaatcgtagaagaggaccacccagcatcaatggcagcgctggaggtacgttcggaagtgccggctctgtgttgttgcgtgatatcttatgaatgtggggttacatgtgtgcagtcgctcattccatacaagaaccggattccatttaatgacttcatcgttgcgaggcggcaggagagtccccgagcggtggtgttcgacattgatgaggctgcgtttgccaggagatggcaagtaacgcgtccactcatgatttctgtcatgaaagatgggcggcaccttgacaaggaagagcgtgaaaacgtggcctccattattccacaccgaagaaaacgccatcaacgcgttacagcgtccgccgcgactagatcaagggatgacgctgacgaaggaagtccgacaaacgaacaaatgggtactgctttggctgatgatcagaaaccagtcctcatttattcaccactcggtgctgcgagctctctgcgggtacgtgtgaagacggatctggaaggttttggttttccgtgccgcgatctggatgaaagccacctggtcgagcagatgaatacctgccggggtgtggtaatgctggtcgaagttccgccatcctccggagataagggatccgatgaagcgaaggcaaataagctggtcaggaagcagctcatcgcctcaatgacccgaattgtcaccgcagcccagacagtgcatccgaggaagagcgtgtaccctgtcatcgtccagaataatttcctagacctcagcaagatgtacactcttgcgcgctccgagttgttttattttgtggatggcggtggatggtctcgcagtgttgggcgtctcgtggatcacctccgacttaagcaagaacggaccagcacagccagcggggttaacatattggctggcacctagtgcatagccagcaactcagatcataagcgctgtcgtttcgggtcactgaaaggccgcgtccgtttcgtgtgacgaaaaactattgtcacgctttggacgtgtgcatgtggtgaatgaagaccgagctgtccgtggtgaagcaatcaccggtactcttcttcacaggacctcatgaccatacagtgacgacaacccgaggcttgctgacagcgcaacgaatgctgattgcagcatggcttggcgtaggcatggtgccgtttatcttgcaaacacgaagctttctcaaattcgtcacacctcacaagatcaccgaggcacttgtggcacctccaggcgcagagagagaaacgacgaatctaaccgagctgtgccctgcgactggatttctgatgtctcgagtgtggtggaatgtggagccaacgcactgctacaaagtcgaggacgggtggatatgtcacgtcgtggttcctcagtataatctgcatggtggttatcgtgtgggagggtcgaaagccactccatttcatacgacgccacgcagctgtgcaaatgacagctacgctttcgagaactacctctaccatggacgttttggttactactcgttctatgaggaagcagaaggcacttactgtgccttggacagaacaggatacgccgttgctaatgcgcttgggacctacgatataaatgggtggtttctcgcgcaagacgggggaagcaaaggctaccgtaggtcatactggtatggttcggtcggctcgctattgatattataccgctttttggtactgcgtcgaagctacattgcgtgcaagcggtgcggacgaatgtgtgacaagatgggccagagtcttccgagaaagcccgccatggtgttcgtccacgaaaatctacgactgtcggctcatggcgcaagaaattaccaaaggtttctgttgctgtatctactgatcgagggcttgatgagcgacctgttcttgctgatcgcgcacgatggtttatcactgagatacagtacatctcaatcggatacaatttgtccggaatgcttctgatggtgtgggaaatcatcgagaatatgcgatggctgggtgaaaggaagcggatgatgattaaacgcttactctacagctacgaatcgtcactcctgggcgaggttctcagtgcagcagttcaaaagcattttctcgttgcgctcaatagatcggatttgcaggagtcacgaccaaccgctttggcagtgtcctactacgtgtggagtttgctgtggcacacgatttacgtcatgatgttgattggcttcattgtatgtgttcgtgtgatttgtgcggtggcgtacgtgctgtcgacaaatcgcacgttaacgatattcacgaggccgtgttgcattgataccgtgttgggtcctcgctgcagaatgattatgctggaaagttaccgtgtggaaggtgaacggctcttttacaaggcagaagcgctgaaggcgtttggcatgctgaagatggaggaggaagatggcgcagaatttcttgttgtctacacgttgcactggatcggagtcccacgtgataacctggttgtaatcggtagcgtctcaggaaggcgggtgcaaccatgtcgcgaacgtgcttgcgcagaagcagtcagatttttcagtcgcagtttgggtggagcgcctggtcagcgtgagagcagtcgtgtcttgttcgttcatagaagtacacacgttgcaccagctccattgggtgttgtgccagcgccttgaagctcgtagttttggcgttggttcatcacgcggagaagcgtctattgttatccagcagttttgatgtccgatcaagtgcggcgaatatttagacgccttgcgtacgacttgtcaatggacatcctgcagccaagcccagtccatcatactgctcaagcctatcacgatgatgcaggggagagttcactgcgttgagtgtggtcctaacaagtcgtcgtttgagccgcgagctagtacatgtgcaggacttattcagtcggttactacaacgcgaaaactattggcggcctggctgtttctcggcatgttgccgttcattctacaagctcggagcttcttaagatttgcgacgccccacagaatccccaacgctctcttcattccggaagcatcagctgaatcgatcatgaatttaacgacgttgtgtcctacgagggaaattcatatgggccaaacgctgtggaatatcgaaactacgcactactactccattggcaatcggagactttgccatttcgtggcacctcagtacaatacgcacgggaatttttggatgaggaccaccatggttgcgccattttccactgcaccggcaagttgtgccgatgatagtgtgccgttcgaaatgttcctctaccacggcagcatcggatacttggcgttctacgaagaagccgccgggacatactgcaacacacgcaagatcgcttatgttcgcgcgcataccctggggaccattgatatcaacggcgcgaagttggccaagtacactggcaagctcgagtccaatttctcgtattggtactgcgcattggggatcgtttggcttatatttcgtgctttcgtgttgcggcgaagctatgttgcttgcaagcgctacggtctcaagtgcgatcaactgggtcaaaccctttcacgtagacggtaacgtaaacgagaacttgcgcttgtctgctcatggggcaactaactaccagcgagtcttcttgctgtattttctagcggaaggactgatgagtgatttgtttcttcttggcgcgaacgatggcatcttcaccagggtccaatacatttctctgggctacaatttgtctgggctgctcctgctactgttcgagatgagaacatgggatggatgtcggagcgatggcactacttcatcaaacgacttctattcaactacgagtcctcgttgctgggagaactgctaagtgccatagcacaggagcgctatatcacggtattgaaccgatcgagtatgaaagatacaagacccgccgcacttgctgtgtcgtattacgcctggagtctggttggccacggcgtcttcatactatcgtttatcgcgttcatcatagtccgagcagtttgggcggtttgttacgtgcgctggagacatgggtctttgtggaatatcttctccgagccatgctgcgtcgacagcacgcttggcacgcgcaacaagatgacaatgctggatggatacctgtgggagaacggcaaactgaactacagagcagatgggctgaaggcgttcggcttgctcaaaaccgaggaggagaatggcgacgagtttctcgttctacggaagttgcattggttcaagattccggaccatgactggattattatcgggaccatacttcggcagtgcactgtgctgtgtgatgagcgatcatgcactggcgtagtgagctttttcgaccggggactgggaggctgccatgttgagatggagagacgacgttcaagccttcttctagtccgcagcatttcgtttagtgtttcgccttcaccgtaaagccgtcgcccgtgagtatccgagtcgcgtgtactgagcgaagtgataaatatggccggtcacgcgaatcaccacgggggtcttactttagttgcctcacccccggccgtttcgacgggtcaacatttttaaaacaactattaaaatagttcttgtagactccttgttgccaggagtgagccaaggagctggcagcagctaagaagaggactaaagtccacgcgaaacaagcccacgaggatcagatggtctcctctgctgctgtcctgacggctcagcaaatgttgctgacagcttggttcgttgttggcatgatgccgttgatcctccaaatacgaagctttctcaagttcgtgacgccacacaagattacagaaactctcgtagttccgccaggggctgaacaagagacggcgaatatgtcggaactgtgtcctgcgctaggtctacaaatggcccacgtgtggtggaacgtcgagacaacgaactactacacattggagcatggtcgactgtgccacttcgtttcgccacagtacaattgccacgggaactacgtcgtcggaactgaccgagtgcaagcttatcacactacaccatctagctgtgcgaacgacagctacctggttgagatgtttttctaccacggcagcatcgggttctactcgtattacgaagaggtcacgggcacgtattgcactatagaccacacgatgtacgggctgatcgatgggctggggacgtttgacatgaacgggtggctgcttgctcaggacggtggcagctacgactatcgcatttcgttctggtatggtaccgtcggcgcgatatgggttatttatcgcgctctggtgttacggcggtgctatatcgcatgcaagcggtatgggcgacgatgcgaccagatgcaagaaacactgccccgaaggacggcgatggtgttcgtccacgagaacatgcgattgtctgcgcacggagcatcaaactaccatcgacttgcgctcttgtatcttctagttgaaggcgtcatgagtgatttgttcctgctcgtcgcaactgatggaatattcgcctggttccagtacatctcgttcggctacaacttgtccgggttactgctgatcctgttcgagttggtggagaacttaaagtggctgggcgagacctctcgactctttatcaagcgcctgctcttcagctacgagtcgtcgttgctaggagagcttctgagtgcgatcggtcagtcgtatttcctgacgtccttgagccgttcagatttaaaggagtcagggctagcggctcgagcagtgtcgtactacgtgtggggattggtgggccatagcatcattgtcgtcgttcttatcggcttcatcatggcagtccggatagtacgagccgtcgcatgcgtacgatggaagtttggccgtgtttgggccattttgacggctccatgcagcgtcgacacgactttcgccacgcgcaacaagatgatgctgctgtctgggtactgctgggacggcggcaggttgtactacaaacccgaggcgctcaaagcctttggattgttgaggatggaggaagaggatggctccgagttcatcgtcctgcgcaagctgcactggttccaagttccgactgtagacctgatcgtgatcggaagtgtgtccgatgaacacgtagagccttgtgccgaacgaccgtgtactggtgtggtgagcttgttcggccgcagcttaggtggccctcttgaccgaagcaaggtttggtcgcttcgtgggagaaacaaggtgtcaagttcgccgtcgctgagaagtatccaagtcgtggcatgcactgagtagagcaggcttgacctatagaaattttccaaagcatgaccaagcactctcataccatgtttgcctcagcaacaactggatatgcctggggtcgagtatatcgtgagaagtcaagtgggttatcgggtgcagacgcagcactgtcgagtgcaaaaatatccacggctcgtccgtattagcggggccacctccaatccgtttcaattcgccaagcctgctaaattctgctactactcagcggaaggaagatgaagcaagtacatgtgcgagtgcactgctccaatgaagaaccggcacggcgcttgtccctccatgacccggaaggaagcactgtcttcgtgactgtgcagcgcaagttaatcttggcgtggtgcgttgtcggcttggttccactcatccttcaagcgcggagcttcctgaaattcgtgaccccacataagatcatggatagtctcgtggtgccggcagacgcagaggcacagacagcaaacatgacggagctgtgtccagcgctgggtcttcagatgtcccaggtgtggtggaatatcgagacgacgcattatcacgaggtggagcaggggcgactgtgccacttggtttcgccacagttcaattcccacggcacctacctcattggatccgagagaacggaggcgtattactccgtacccgagagctgcgcgaatgacagctatccgttgagtatgtacttttaccacggtacaattggattctactcattcttcgaagaggtcgaaggcacgtactgcaccaaagatcatacaatgtacgggcttattgaccaactcggcacctacgatatcaacggctccctactcgctaaggacgcaggaagcctcgccaaaagatggtcagcttggtacgctaccgtggggttggtgtggattatctatcgattctgtgtcatccgccgaagcttcatcgcttgtattcgctatggccgcaagtgtgatcagttgggtgaaaatcttaatcgaagagcggtgatggtgtttgtccacgagaatttgcgactgtcggcgcacggagcggcgaatttccatcgaatggttatcctgtatctgctgattgaggggattatgagcgatctgtttcttctcgttgccactgaagggatcttttcctggttccagtacatttcgttcgggtacaacctatcgggtgtggtgttgctgtgctttgagttgattgataacatggggcggctgcaggaaagcgcccggcttgccattaagcggctattcttcagctacgagtccgccttcgtcggcgagctcctgggtgccatcggccagccttacttcctcacatcgctctgtcgctcggatctgaagaagacaggagcaacagcccgtgctgtttcttactacttttggggcttagtgggtcacgccatcgtcgtccttaccatcatcggcttcatcctgctcgtccgagccctccgtgctgtgtcattcatgcgatggaagtttgggcatgtccgcgccattttgatgacgccatgcagcgtcgacacaactttcgccatgcgcaacaagatgatgatgctgaatgggtactgctgggacagcggaaaactgtgttacaagcctgaggcgcttaaagcatttggattactgaaaatggaggaagaggacggctcggagtgcattgtcttgcgcaaactgaactggttcaaagtgccggcggtcgatttggtcgtaatcgggagcgtgtcggggcagcgcgtggagccatgcgaggaacggccgtgtactggcgtggtgagcttcttcgatcgcagcttaggcggccctctagaccaaagcatcatgcgctccatccttgtgagacacaggagttcgctgtcgttgaagggtctccagagcgtcactagaagtatacgtgaaggtagagcaagcttcgcacggtaaaacttctccctacctctattaggcacgctgaacaaatctatcaacaaagtttggagcatcgcagaatttgagtgtgtccgacggagaccaacaagtgtcaagagggattatcggttgcaagggtgcaaatatatccgaggactggacgtttcagctgggccattccaagtcgattcgtcaaagcttgcgaattgggagtgagcgaaagatgaagcaagcacgagtgcattgcttcaatgaagaacacccgcggcatgcgtcctaccgcgccccgaaagaaccacgggattcgtgactgtgcagcgcaagttgctcctggcgtgatgtgttgtcggtctggccccgctaattcttcaagtacgaagcttcctgaaattcgtgacgccacacaagatcaccgagagtctcgtggtgccagcagatgcagagccactgactgcgaatatgacggaattgtgtcctgtactcggccttcagatgtcggaagtgtggtggaatctggagcctacccactactactgtacaacgtgaagcaggggcggctctgtcatatcgtctcaccccagtacaactgtcatggcaattgtttgataggggccgagaaaacgacagcatatcactctgtgcctgcgagctgcgctgacgacagctaccctgtgaatctgtacttttaccacggtactattggattctactcattctacgaagaagtcgctggcacctactgtactaaagatcgcaccatttacggcatcatagacgaacttggcacggacgacatcaacggctggttactcgctcaagatccaggaagctatggctacaggtggtccggttggtacgcaaccgtggggtcggtgtgggttatctatcgcgcattcgtcatccgccgaagttacgtcgcctgtaagcgctacggacacaagtgcgatcaattgggcgaagatttggatcggaagacaattatggtgtttgtgcacgagaatatgcggctgccagcacatggaacgacgaattaccatcgagtggttctcctgtatctcctggttgaaggaattatgagcgatctgttcctcctcgtcgctactgaagggatatactcctgggtccagtacatttccttcgggtacaacttgtccggcgtggtgttgctgtgctttgagatcgttgagaacatgggctggctgacggaaaccacccggctcgccgttaaacgactgctgttcagctacgagtcctctttagtcggcgaactcttgagtgccatcggtcagtcgcatttcctcacaggattaagccactccgacttgaagaactcgggatcagcagtgtcttactacgtgtggggcttagtgggtcatgcctccatcgtactcaccctcatcggctccatcatgttcgtccgggtagtgcgtgctgtaacctacatgcgctggaaacacggggtttggtggagtatcttcactgccccatgctgtgtggatactacgctcgggatgctcaacaagatgaagatgctgaggggttacgagtggaaaggtgggaactctactacactcctaccgcgttgaaagcctttgggattctcgagatggttgaggaggatggcactgaattcctggtcttgcgcaaactgcattggttgacgatcccggcgaatgatttggttgtgattggagtcgtgacagggcagcttgtcgagccgtgcattgaacgaccgtgtctgggcgtggtgaccagacgactgcgctagcaacagttaccccttcgaattgttcttttaccacggcagtattgggtactattccttctacgacgagctagttggcacgtattgtactaaggacggaactgcgtatactcacgtcgctggggttggcaccttcgacataaatggagcggatctagctcacgatcttggtagtgacggctacagatggtcctactggtacactatcgctggcgcttgctggctcgtgtttcgtggcctcgtattgcgaagatgctatgtcgcatgcaagcgctatggcgttagatgcgaccaaatgggcgtgaagcttcaaaggaaagcagcaaccatcttcgtacacgaaaatttaagattatcagcacacggagcgacgaattaccatcgagcgatggtgttgtatctgctccttgaaggcctcatgagcgatttgtttctacttgcagcaacggacgggtcttttgcttggatccagtacgcctctctaggctacaacttgtctggtatacttctggtattatttgagatgatcgagagaatgggctggcttcgtgaaagctcgcggctttttgtgaagcggctgctcttctgctacgaatccgctctactgggagagcttctgagtgcaatcgggcagcccaccgtcatctcgttgctcaatcggtccgacatgaagaataccagaccgacggctgccgttgtgtcgtactacatgtggagcttggtggggtatggccttattgttctcgtccttatcgggttcatcatgttcgttcgaatactccgcgccgtcacctacgtgcgctggagccatggcggatacgtgatatcttctggactccgtgctgcgtcgacacggcattcggagcgcgcaacaagatgacgaagttggcaggataccactgggagagcgggaaactctactacaaagccgacgccttgaaacccttcggactgctgaaaatggagggggaggacggcagtcagttcctcgttatgcacaaaatacgttggtttgacgcacgggacgaggatttagtggtgatcggcgctgtagctggaggtcgtgtggagccctgtggcgagcgtccttgctcgggcgtggttggattcttcgaccgtagcttgggaggcccggtttgcgacgctgcaagtctccgttcagtggtcattcgtgtggggaataaagtttcaccttttgctccgagttgactgggatacttatgaggtacgattctgctacgatgctacgttgaagtcgagggtctcgagactaaagcttccgaggggtttgttcccatgaatacccgattgtcaagacatagctgatctcctaaaaggagtcgatagcgaatgatttttattttttactgggaaagatatttattcaaccagagcatttccagctacttgggctttgtttttcctcccactcagcgggttattactggacggcttgtactgcagaagcgcatccgtttcgtggtgactagtggattgtgtcatcgtagctattcctgaccgatcccagaacttgccgaggactatggcgctgggaagagtgctttccgtccaagatggacctcatgctcagatgacggcacctgctcgctctaacagcgtcatgaattccaagcggaagctactggcagcgtgggcgttcgtcggcattctccctttcattttgcagatttccacgcgccctccagcgacggagccaatagcgaccaatcgtccgcaaaccagtgcagtttgtttagaacgagaaattccgtcccatcttcctccaccgctttgagaagtcccaacgattttaaggcctccgcggtgtagtaaagcttcccattctcccagcggtagcctgccagcttcgtcatcttgttgcgcactccataggccgtgtcgacacaacaaggagcccaaaacgtatcacgtgttcgtccatgcttccactgcacgtaggcggctgcgcgtagtagtcgtaccgatataatgaacccgatgagaaccagcgcatgtgttccgtgtcccaccaaactccacaagtaatacgatacagcaagtgccaccggctttgtctgcctcaaatccgaccgattcatcgatgtgaggacgtacgattgccataatgcactcacaaactcccctagtagtgacgattcgtagctgaaaattaagcgcttcacaaatactcggtagctttcacgtagccagccgatattctccaccatctcaaacaatagcaatagtactccagatagaatatatcctagtgacacgtactgaagccaaacaaaagatccgtcggttgctgcaatcatgaagaaatcgctcatgaggccttcaagcagcaaatatagcagcaccagcctctgattatttgtcgcatcatgtgccgacaatcgcaggttttcgtgtacgaagatcattgctgctttccgtccaagattcacgcccattcggtcgcatcttgagccgtagcgcatgcacattacaaagcatcgtcgcagcacgagacctcgatacatacttctctggcccacataagaaacaacacttcggttttctggacataacttttaaaaaaaaaatcgtttggtgactcgcaatacctcaaccgaaagctgcgcatttgctccgtttcacgctatgatttaaaaaaatctagcaacagaaagaaaagagaaacagccttttatctgaagtccgttttaggcaacattaagttttttagcgaggtgccgtcaaaaattagcgatattagaaaataaaatatcaccgtaatcgcgagtgactgctttacccttatgttcggttgtcgatgttgtagcgcctgttggagactagttagaagggctacagttttgaggtttttctacgcgattatctcgacatgcgcagacccattaattttggtcaatagtaagatgaaacagttgattatacccaatcatatgtgacatgtggttcacatcaaattgaggtctaatgccgaatgttgtttctcaagtgatccggcaatacagtaccaatacgacaacctgtaaccatcaccaccgagatgctcagccagagcttttccattgatatcgaacgtgcctagccccaatacgtgcgcgtatgctgtgttgtccaaggtgcaatatgttccggcaagttcgtcgaagtaggagtaatagccaacgctgccgtgataaatgaagatctcagctggataactctcgttcgcgcaggtggatggagctgcgctgtatgcttccaccttggtacttcccgttaagacgttcccgtgactattgtattgaggaatcacgaaatgacatacacgaccatgctccaattcgtagtagtgcgtcatcgccacattccaccacactcggccaacgtgaaggccctacattcggctaaattgtcggtctcttgccttgagcctggcggcactgacagtctctttggaattttatgtggagtcgcgaaattcaagtagctgcgtatgcgatgagcgtccttgtacgggtgtggtcggctttttcgatcgaggtctgggaggaccggtgggtggtgcaggaagccccggttcgattgccattcaactggggaacaaagttttacctgcttcttctgctctcagtgtccttcctacttgatgctagtggcctcgctcatgtggctgtatttttgagatagaaatcagaaataataatactgaagaaacaccatgatctcaattggttttggctccacattcttgctgctcgtatccacctgctttcttgggtaaggatattataagctttttataaccaactccatggtgaacagagataacgactgagctccgatggctcgcaaggcttgtcaacaattagccttgaagctatctatggcgtgcctgacgcagacctccgtttcgattctgtcttacagcggtgacaatatattcctgaacaataaaaaacatcacctcgactacagtatgaagtttggacgagtgcattcgcttcaagatggaccgccgagaaagctgacaacgccagctcggggtagcagcttcatgacaccccgacgcaaactcttggcagcctggctagcagtcggcatggtaccgtttgttttgcaggttcgcggctactttaacttcgcaatcccccaccaaatcaccacaaagctgctcgtaccgccaggggcggagccaaagaccgataatttactcgagttgtgcccgttgaaaggtatccacgtcggccaagtgtggtggaacgtggaaatgacgcactattacgccttggaccaaggcaatgtttgtcacttcgtgattcctcaatacaatagccacggcaacgttttaatgggcagcactaaggtggaagcgtaccgcacagcgccctccagctgcgataatgagagttacccggtcgaaattttcatttaccacggcagcgtcgggtacttctccttcctggaccagctagtcagtacctattgcaccctggacaacacggcctactcgcatgttttgagcctgggtactttcgatatcaacggagcatccttagctcgtgaacttggcggcgaaggatacaggtggtcgtattggtactgcatcggtggagcgatgtggattatttatcgagggctcgtgctacgtagatgtttcgtcatatgccagctctatggcgccaaatgcgatcaaatgggtgtgaatctgctacggaagcaagctatgatctttgtccacgagaatttgagattatcagctcacgaagcgacgaattatcatcgagtattattgctgtattttttccttgaaggtctaatgagcgacttgtttctggttgcagccacggacagctcgttcatttggctccagtacgtgtcgctcggatacaatttgtctgggatcctcttgcttctgttcgagatggtggagagtatgggctggctacgcgaagattaccgactttttgtgaagcgtttaatttttagctacgaaccttcgctgcttggggaactcgtgagtgcaatctggcagtcaaatattctcacctcgttaaacaagtcggatctgaaccagaccaaggttcttgctgttgctgcatcctattacttgtggggtttggtggggcacggagccattgcgttggtgctcatcagcttcattgtctccgtccgaatactgcgcgcggtcacgtacgtacgctggaaacatgggcgggtttacgacatcttttgggcgccttgctgcgtggacacgacgtacggagtacgcaacaagatgacgaagctgggagcgtaccactgggaggacggcaagctccgctatcgagcggatgccttgaagtcctttgggctactcaaaatgatgggggaagatggcaggcagttcctcgttttgaacaaattgcattggtttaaggtacgcggggacgatttggtggtgatcggctccgtggtagaagaccgggtgaaaccctgcgctgagcggccatgtaccggtgtagtcggctttttcgatcggaatttgggaggtccagtcagcgatgcaggaagtccccactcagccatcattccaatgggcagcaaagtgtcgccttctccgttaagtcttagcatcgttcccaattgataccccactttgaatgccttgtaagctgaaatctatctgtggcgtgatccgtttcggaaactttggggataactccacaagtcagtcaccccaataggtttgtcgaccatgtcgtggagaagagtgtcctgcttgcatggtaaactcacaacgccagctcgatgcaaggtcacgatgacgtcgcagcggaagctcctgaccgtgtggttctgcatcggcgtgatcccgctcattctgcagattcgcggcttcttgaaattcgcatctcctcacaaaatccccgagagcgtgatcgtacctccgggtaccgagcccaggaccgataatttactcgagttgtgtcccatgaccggtcttcacgttggccaagtgtggtggaatgtggccatgacgcactactacgaactggaacgtggaatagtctgtcacttcgtgatccctcagtacaacagccacggggacttgtcgattgggcggaccaaggtcacaccattccacacagcaccatccagctgcgccaacgagagttttccagccgaaatgttcatttaccacggcagtatcggctatttctctctctacgacgagctggtgagtacctattgcaccgtggacaagacagcgtactcccacaccgcgggggttggcacttacgacatcaatggaaaatcactagcccagcatctcggtagtgacggctaccgattgtcctactggtactgcatcgtcggcgcgagctggatcgtctttcgtggtctcattattcgacgatgtcacttggttagtaagcattatggcgccaaatgtgacgaaatgggggtgattcttgagcggagagcagctacaatttttatctatgaaaacttaagattatccgctcacggggcgaccaattatcaacgcgcgctgctgctgtatttactggtggaagggataatgagcgatttgttcctggttgcagccacggacggcgccttcatttggctccagtacgtctcgctggggtataatctgtcgggagttctcttgcttatattcgagatggtggagagtatgggatggctacgcgaaaactatcgattttttgtgaagcgcctgctatttagctacgaagcttcactaatcggggaactttcgaatgctatttggcagtcatacctcctttcgtcgctgaataggtcggatctccggaacacgaattcggtctcgcttgctgtgtcgtattatctgtggagcttgtggggacacggagcgattgtgctgtgcttcgtcgcgttcattatgagtgtgcgaatagtgatcgcggtcatctacgtgcacttgaaacatgggcgaataattgatatcttcctgacgccttgctgcgtcgacacgacgtatggagtacgcaacaagatgacgaagctgtcgggttaccactgggaggacggcaagctctactacaaagcagacgccttgaaggccttcggactgctcagaatggtggagaacggcaaggagtttcttgtccttaacaaactgcactggtttgggcttccgacgaacgatttcaaggtgattggctctgttgctgacgatcgggtggagccgtgcagtgagcgaccatgtaccggtgtgattggcttcttcgatcggaaccttggtggacctctaggggattccgagagattccgctcggttattgtgcgcaggaggagcagcgttcagccatctttatcaaccagcgtccttcctacttgatggcattactttctagcaatctgtggcgtcgtgactcaactcggcattattattcatcgatgtggtcagggccacttggtaatttcactcacagtgccagcataactgtcacatctctgcagcgtcggaatcctgtgcttcatttgtagacacgcttctagcagccccgccccacacaagatcaacaggaacctgtgcataacagcaggaacagagccacagactaacaggttccttaaccgcgccactatcgggtatcgacttgattcgttcactttaatcggcgggtaggaaaaattcccgcgtagagcttagtggaatataccgttctcgcgttgatatccactggactggtgcgaactctgtgcgcggccgcctatgttcgctagagacacgtgatcttctgggcgcctcgcgcgtcgtcacgatctataggtgacgaactctcagtggcatgccgctaagacttccgtttcaattccatcttaaatttggttccgaggcatgacgcagagctccgttttgactcggtcttgtaggagcaacccagtcccagtgcagcttgtgtctgtcgaccacgcggaagcagagtgcagtctcttcaatctggaccgccgagttagttgacagcgccagctcgagccaaatacaacagaattatcaccgcgcagcggaagcttctggcggcgtggcttgccgtcggcgtgatccccttcgtgttgcagatccgcggcttcacgaatttcgcaactcctcacaaaatccttccgagtctcatagtagaagccacagaccgagaatttactcgagctgtgtccgctgataggcatccatatcggccaagtctggtggaatgtcgagatgacgcattattacgcattggagcatggaaatatatgccacttcatgatgcctcaatacaatagccacggcaacgtcttgatcggaggtaccaaggtggaaccataccgcacagcgccatccagatgcgctaacgagagttacccggctgaacttttcatttaccacggcagcgtcgggtacttcagcttcctggatcagctggtcagcacctattgcgctctagacgacacagcctactctcacgctgtggggctgggtacgttcgatatcaatgggaaatcgtgcttggtggtgaaggatctcggtggtcgtattggtactgtattggtggcggaatgtggattatttatcgaggcctcgtgctgcgaaggtgctacgttgcatgtaaacgctacggcaacaaatgcgatcgaatgggcgcaacacttcgacgcaagcaagcgacgagttttgtacacgagaatttgagattatccgctcacagcgcgacgaattatcatcgagcggttctcttatatttactgcttgaaggtctcatgagcgacttgttcctggtcgcagccaccgacggctcgttcgtttggctccaatacgcttcgctgggatacaatctatctgggatcctcttgaaatggtggagagtatgggctggctacacgaagattaccgactttttctcaagcgtctactttttagctacgaatcttcgcttcttggcgaacttctgagtgctatttggcagtctcatatccttacgtcactcaataaatcggatcttaagcagacgaagtctgttgcagtggctgtgtcgtattacttgtggggtttggtggggcacggagccattgcgttcgatggccggcgctcatctgttcgagcctcacacctgcgtgcactgggaacatgggcggatacgcgatattttctgggcgccgtgctgcgtcgacaccgtctacggagtgcgcaacaagatgactaaactcgcagcgtatcactgggagggcgggaaactctactatctgtaatggtctaagtctacgtggacaagcgcccgtctcgacatcgatctcgtcagcggttcccgtgtcgacgcagtaccaatcgaagctcgcctccagatgtgtcactctgctctagagacgtggaccagtctccgttcaactccgctccaagtcactacttcgtgctcggcgcatctctgcttgtaccaggcttcaacctggctttcgtgttgcattagcagcgtctcccctggagacgcccctcagagctagctaccggtacttgttgctactcgctaacctcaattcaatggcattctgtattttgctcagtcaagtacaagtggttcactccactatcgagcggacgccttgaaacccttcgggctactcaaagtggtgggggaagacggcagccagttcctcgttctgaacaaattggactgggttaaggtacggccggatgatctggcggtgatcggctcagtggacgaggaacgtgtggaactttgtgatgaacgcccctgtaccggggtggtcagctttttcgatcgtaatttgggaggaccagttagcccgcgctcgaccgccgttccgatggggaacaaagtgtcaccttctccattatcactcaacatcattcccacttgatcctccaacgcagcgcctgtgacggcttctgctgcaacttgtagggtcagctaggaaaaggttgacgtatttggggtcagttgggataattatcctccaccacacgagcctctacatccgcgagcactcgtcggagcaagccctgcgacaaaatcgtgtacagcgaggcattgtctagcatttcgtcgttcgggtgtaagtggaattacctggacacgtagcaaacgccgagcgtcgacatcttctatcagaagaacgtaccagtggcttctctctcgatgcaaaagttgcggtacactgggggctccacgagtatattaggcgatggtccacgagcgctccatagtcgtagagcaaaatcttcgtggtctcaagatgactcaaagaaagcacgtaataaatattcaaaaacgaaactatcgcgtcgaattctaccgtaaaaaaatctgaatacaagttacagaacgcctgatagtcgagccgcctaatgctctcgctttggtcgaattcttcttgaaaggcttactatccaacttacaggtctacgcgttgtatctgatcggatagaaattcttctcaactttcaatctttatcactacgacatcacctgtgtccttactcttggtttcgatatggcatggcggcaccttggatcagcatcccattttgagaagccaaaaatgccgcaggagtgttgagcttgcgctgatgtcctcagacatcaaccagcatttgtgaagtctatctatctgcggcgttatccgtttcggcttggtgtcttaactccatctttgtcatcattcataacgtggtcgtggctgcagacgaaccgcacagaaaactatcagcgccagctcgagacgcgatctctatgaactccaagtggaagctactggcatcatggctctgcatcggcacagttccctttatcttgtagatacgcggctacctgaagttcgcagttccacacaaagtcaaagagagctttttaattcccgcaggaacggagccgcagaccgacaatttgttcgagttgtgccccatgaagggccttcacgttggccaggtgtggtggaatttagaggccacacactactacgcagcggaacaaggtcacttgtgccacttcaatacaactgccacggaacctttttgatgcggtggaagctcaccacacagcgccaaccagttgcgccaacgaaatttaccccgttgaaaaaatcctttaccacggcagcattggatatttctccttctacgacgaatttgttggtacgtactgcactttggacggcacagcgtacacactcgtgactggggtcggcaccttcgacatcaatggagacgccttggcccggcatcaaggcactgatgggtacagatggtcgtattggtactgcatcgtcggtggaatctggattgttttcaggagtctcgtgctgcgacggtgttacatcatttgtaagcgctatggagccaaatgctatcaaatgggcgtgagtcttcgacgagaatcagctatgattttcgtacaggaaaacctgcgtctgtcagcacatggagcgaccacttaccatcgatccatgttgttgtacttgctcctcgaaggtctgatgaccgatttgttcctgctcagagcgaccgacgcatctttcgcctggctgcagtacttctcactgggctacaacttgtctggtgtgctactggtgctgttcgagaggatggggtggctgagcgaaacttaccgtctttttgtgaagcgcctgcttttcagcaacgaatcctcgctgctgggagaactgctgagtgcaattgtacagcccttgtatctttcgtcagtcaatcggtcggatatgaggaatactcatccggctgctcttgcggtgtcatattatgcgtgggggttaatggggcatagcattattgcgttgggtctgatcggactcgtcattttcgcacgagtactccgcgcggttacctatgttcgctggaaacatggccgtatacgagaacatcttttgggctccgtggtgcgtcgatacgaccttgggagcgcgcaacaagatgacgaggctggctggttaccactggcgaaacggaaagctctactacaagccagatgccttgaaatcgttcggtcttctccgaatggaggaggaggacggcaaggaatccctcgttctgaacaagcaccattggtttgaagtacggacggacgatttagtggtgattggctctgtagccgaagaacgtgtggagccttgtagtgaacgtccttgcacgggtgtgatcagctttttcgatcgtaacttaggtggacctctgggtaattatgaaggatcccgctccattacttgtgtgagaagcaaagttctcccttctccttcgtcactcagtatcattcagacttgaaattgaactaattcctcgcacaacgataaagtcactcacactcccgctcgataatctccagctgacttgtaaaccgtccttctcgatgctctgggctcaattcggtatcagtgatggtcacgtaaggcagccgtaaaacagctagctttccgaacgccttcaaatacgcgggaggcgttgctcagccattcgcgcaaggacagcgcatgcggcggtggcagaggttttgaccccggggttgtcgcgatcggcatcggctgcgatgaaaacgagggcgagctgggtaaactcaggacgaagcgctggaaatcctgtgcagcttcatcaaagctggaatacttgtcggtttcaaccatgctgcggtctgatcccttcttgttcccactcgcagaagctggtcgttgtctatgcgggaacacaaacgacgctgtactgccgccttcatccagctggtcgctgtagcttgataatttgtacggcacgcgaaccagtgcttgcggccacgctgcttcaagcgctcgctcgtgggcagagaagagctcgttctcgcggtagagcaacccggagtccgcgacgttgttcgccgcaaacaacagccgcgctgcgtgcttctggctgctaccggagacactgggcagtcggcactgggcaaacttatgctcgatcttccttaccaagtcatagaccggaacctggtaagccagcccatcatgcacaatcaccacatagtggcaaatggcgcacaagaagaccgcgatctggagagacgcagcctccacttgctgctcgggcgtgagcgcgccgaatctcgaagtctcgttacgctccagcacgtcagccagcatcgaactgctcagcaacggctgcgagtcgagcagaatcgtcgggtgtcccgacccgcccaccatggagacggccaggtccacgcccgtggtctcatggcggtccatgaccacagcctccaggcttcttgtcgagaagatcgtctccttctgtcctctaatgtccttctccgccaataacgacagcactgtggacttccccacgccttcgagccccagcacccccactaccgtaaagtttgtgagttctaagcaactccccaacttcatcgacaggtctgtggcgaactgcatctgaggcgtgatgagcttcacgctggtgcttgggggcacgatcttggtctgctgtatagtcgaaggcctcttaatgcccggagagctacttgctcttaaactgtgtagagacggtgctcttaaccccgagctgccactgagtcgggtgttcacctgcagttggggagcatcgggctcgtagaggacgccggaggacgcgccgctgggcggacgcagcagcatggacgggggcttggacataatggcagctggtgagggcgcgggtgccgccgtgcggctgcgcggccgctggccgcggaacgccccgcgtgcagggccttggccttggcctggagctgccccgctcatactggctcgggacggagcgccatggctcgcggaggcgctgctgttgcggcggttgctgccgctgcgctgtgaagagagataaagagagggttagatagcgagaacgaagcagcgtgggggcagagtaaggctcaccttctggcgctgcttctgcggcgtggtttcgcgatccattattgcgcactgaggtgaatggacaacagttggcgagcggaagttgctcttcaagtgtataaattgattcacgtgtgccgtaaataagaatgcaaggttgccgtaatgggcgataataaaatcaaggtaaccctgtagaatgtggcaaaaatgggcatatttagttgggctacagtactgtacttctacacgcgcttgtacttgtcctgacgctggcggcggccgcgcgctgccgtcgtggaggagcctccacgcgccttgttcttgcccgcgcccttttgccgccgcttggtgttgcgggacatgaaggactcgcgctcgtccacctcctggtcgaagaggcccagcgcctgactcagagccgtcacgggctgctccttcttctgattctgctgctgcagcttgttctgctgccgcttgagcgcgcgcgacgcttcgagctcggcctccgcctgcttctcggcgttcttggaggccagcaggtccttggccgagctggccacgacggcgccgctggcgtccagcgccaggtccagctccgagaataacgacatcatggccgacttgccggcggtggggccgacaggcgccgacacgacggcgctgctgccggtggcgcccagagaggtgcgcagactcgagacgaagggcgtcgccatgttggacggaaggtgatggatggcaatgctaatgaccaataggctcaattttgtgccattcggtggcccgaaggcgctcgcactttagggagtctgcacacgatgagcatccatccctaaccctccgccccgccgcccgtgtttgaaatccgagccaaattggcgcgttcgcagttttgcggagaccgtgcatgggacagtacatcacctgctcctgccaccgatcggcaataaactaacttaactcattctgtagccataccacaaaagctccgttggcttttgaggtaaggctacatactgagttaagttgactgacaataggatttgattggctgataaaagcgtgacagttgaaaataccgaattattagccggtttacttattcaaggtaccgataattcggaattttcgaggcggcggtagggaggcagagcatccacgtgctcagtgagtcgggcaggtacatatccatccaatcgaggcatatttccatgttctctcagcatcgctgagagctactggggtctgacgttgaagtaccgaacttagaaacgattaccgctcggtatttctgaaaaacgggggctcaagtgcaagcagagaggtgtggcgcagccggtgcaggggccttgactgcgtttcattatgctctgaactcacatgggacacttttagattttttgaaaagctcaaacgtaggtcccaacttcatcgttcaagtatacaaatgaagccatttacttcgtgtaccttggtgaaaagtcacggtaattgcccggcttaagataatggctaagaaaagaaatgctaggcaacagtctaagccggtgtaaaccggtgctaacccaaaacttgatcgcagctcaacggtacgttattgtgtgcgattaagtgtcgatttgtataccaacgactagtcgcagagctatttatgcagataaggtgcttgcttttacaccaatgagagtcaatcacaaattatggggcatgaggtgccggcacccgacttcgttttactatccaattagaaacgatagaaatagaaaagaaatgatggatagttaacgcatattgtatactttcataagatatatcggtattaactcatcgtcagcagggtcgcacgtggcttgcttgatggcgtccaggaagtgctgcaattgagatcatgtatcgcgcggctacacgtcgacccagctgcgagtcgtagccaagtctgcctccaaccgagctgcaagagcgcttcgactgtcgcggatggggtcgcttggtgcttatcgacgtgtcagcaacctctcgtacccccagacgcccgtctgcacccgcagtcactgccatcggcctttgaggtgcgtagtattcgtacggaatatcactgccggttcagtagcagctcattctcagccactgcggacccgatatacaccgactgtactgacgtgttgcgcattgtgccgttgttgttgctgttgttgttgtgcagagcggtctgtgcagttttcaccgccggccacgatcaaactctatactattgccagcgagctagcctaggtctacccagcgtcgaatggtgcgtggccattgctccaagctccacgctgccctcatggccctatcacgctatgtagcagcagcgtcgctcggcgtgtggcggtaccagctccgcctgaagcacgtagccaaccacagtcacaacctgcagcgggattttgcgtgcgcctcatcaagcctacgctggcggctgacgcgtgctacgcggggctgtacgtgcgccaagaggtgtccaacctggagcagacaaactttggtacatgtacgggcggcgttttcaggagttcgaccgtgagggcgggctttcgtctcaaagacgcggaagctgtcgttcaagaaggtagaccacgtgcacgatcagagcaagcagaacccgattccaattctttcagtagcagtagtaagcctcggatatgaagctagtaatcatcgtattggcatgtttcgtggggctctgctatgatattggcagcagtcgacaaaattggttatacatttgtacggagttgaactgtacagcgggtgggcaaagtcagcaccccccccatctctgtccttggcaacttcaacaccttaccagactagagtgcaagtggagattttgatctcgatcgcgatgaaagcggctttcttcttgtggttcgcttgcctgcatctgattggcatgctatttaacgaaatccaccaatccacggagccaaattcgtttatactacattaattatactgtcttctgagaaccagtcgattaaacgcaagccgagttcgagctcgagttcattcgagcagtatcatatccctttcatccgactagaccctacatgacacgaacagcaaggcgtcagtactcccaagaccttcgagaccgcgtcatccacaaatggaagaaggagaagctgggctacaagaagatcagcaagcacctgtgcattcctcgcccaagcgtgcgctctatcgtcaagttctacaaaaagcacgggcacagtaccatcccgcagcgtacaggacggcctcggcgaaccaatgaccgcgtcgatcgccgtatagttcgggaagtagagcgcaaccgctttgttagtgctgcggttgtcgccgctcaagtggccaaggacatcggtcagccagtgtcaagcacgctcgtccgcgagcgggttcgagatacagggctccatgggagatcggctcgtaagaagccatacctaagtcgtaggcaccgccggcttcgcgccgcttacgcgaagcggttcgacaacatggcccctgagtggtggagcagagtgctgtttagcgacgaggcgtccgtcgagcttcacggcacctctggtcgagtgtcggtttggaggagaccacacgaagccttcgatgcacgctgcgtcattccgacatataagtcaagcagaaagtcgctgatggtgtggagttccatcaccgctgatggtgttgggactctacatttctgctaagaatccgtcacgggtgactactacagacgcatgttgcgccaagaaattcctactaccaaggcgttcatgagtctatcaggtgagacactttttgtccacgacaacgcgccggcccacacagccaagctgacagcaggatgcctacgcgaactgaagaacgtctggttcatcatgaagaaggagttacagaagaacccggcaacatcactcgatgatctcaagattaagcttttagatatttggactaacattgatgacgaagtagttaggaagtgcgttctttcaatgccaaagaggctgaaagcggtgcttgccagcagaggtggtcatacaaagtactaagttgaagtagtaaatgtacttccaatcatatagaatgggggggtgctgactttgcacacccgctgtacatactaagaagcagattaaagagatctcgcatgtcctcgggagctcacttctctacgttgtgcttctttacgatacaaagtatacacatacaaagtatacacaaattatgagcgagacgctctttcactaagaagaaattccatattagtgacaagatcgtactgctcgcgtagtacatctaagacctcgcgcgcgaagcgtgctactgaacattgatcagtgctgagagacctcgcgcgcgaagcgtgctactattttggcaatcaacatcgaatccatggcggtcacgttgaagtgcactgcagaagcaaatggatgtgcagattggcgcccacaggtgtccccatgtcaacgcatggtcccgtgagctatgcgcctgcactgcagcgtgtcgggcttcatgctcgtgcatgtaccgtagcccacggttgagccccggagacctaggcggcaatgaggaggaagtggcgattccggcgcgagaagctgaagcattctgcatgcacttcgttcgtactacccgtgccgcacatcaggttgatctggcgggacaagaagcacgcccgaaagatgactcaaaatgaaaatatgtgcaaatcttactcagcacagaattctcaagttcagctccatttacataccagattcaccagaaggtgcctccagcggcgacatcgcagtaagttcgtgctcggaggcaggcgcgggcggctgctcgagaatgcctcccgacgtattgatgactcccatctcctcgatcccggtgggcctgtcggcagccaccgtcagccctacgggtatgcaagcgtctcgaaatgccgcggaatcttccaccggagacacgagttggtgatattcctctccactaggctcgaaagaaaggagcgcaatgcgagcgggcattttggtgccagcttttctcctccatcgccgcggtcttacagtcaaaagcgtttaaaggcttactgtttcagcggtatgctcagtgttgataactcagtcatgtgaaatccgatcttggatcacagaaaatgggatgtgcaccatatgttatttgtgtatttttgcggtttttaactgggcgtcccttgatgaatcggaaagcgatttcggcgaatttaactcttcaataagaggagttgagactggcatggacggaaagccctacatctaacttgggtaatgccgctgcatgaagcgctaaatgtaagtatttgaatttgaatttgttgcggtttagatggctatctactcccaggatcgctctcagctgcaatcccgccttcaaatgccatccccgtgccagcacacacctacggtagaagccatgcgttgcggtttttgaagttacgggaggcatactcgaagcagcccccccccccccccccggcgcctgcctcagagcacgaacggcagacaccggccaccagtgtacaccgcaccgtaactgcgcacgctaattcaacttgcaggacaagtgcgagtgtagtgagcgggcgagcaggacttgctgctgcgaagtgccgcaaactagataacgatcagtgtgtttcttgtcccgcctgatcaacccgatgtgcggcacgtggttgtacttcgagcgaatgcttcagcttctcgccctcgttaccgcgtaggtctgcggggcggagcatgaagcatgtccgacacgtcacaatgcactgcatgtagcatagtgcgcccccaggagattatgcgcgatgagtcaatagcatggggacaccgtggggaccaatctgcgcatctagttgccccagtgcacttccatggattcgacgttgattgccaaatcatggaagtctgcctcgattggatggatatgtacctgcccgactcactgtgtggatgctctcggccagcgcatcctcatcgtcgacgagctccgttccgtatatctcggagtcttgtccggccaacatgacttccctacatgtactgcacctaagtctctcaacgatacagcactgcggtaccgggtctccgatactctcctcctcattttctcttttgcctcttggtacgcaccacagctccgctcgtcgactatccaccatgggttgcgacaagaagttcctcacgatggaggatctaaaggtagcgttcaacatcttctgctgcgtctacggcatcggcacgctcggtatgtccggcaacttctcgcgcgccggtcccgtactggccgtcatcggcatggccttcatggccttcgccaacgtgtacgcgtccgtggccatctgccgcgtgatgctgctggcgcccacaagcgtcaagacctacagcgacctgcatgggcaggtgggaccgttggcttgcggtcgtctcgcagatggccacgtgcctgctcgtgccctgcgtcctcctcgtgctgggcggcaccttgctcgacggcctgttcccggacgccttcagccccagctactgggtctgcttcatggcgctcatgtgtctgcccgtgtgcctcaccccgacgctcaaggaaggcgccggggccgcgttcgccggctgcgctgccacgctcatcgccgacgtcatcggcgtggccgtcgtcatgtacggcatgcgcggccacccgactccgccgtcgcccgagctcaagttctcgcaagtcgccggcatgttcggcaacctgttgctcgcctacaacgccggcatcgtgatcccggccctgcagcgccagcacagggagccgacgcgcatgccgggcgtggtgttcgtcaccatggccttcatctcgtgccttttcctcatcctggccagcacggcgtactcggcggtgggctgccagatcacgggcaacctgctctactccatctacccggactcggacacgggcctcaccacgctgggcttcaagtccagctggagcgccgtcgtcatggcctacttgttcatgcagctgcacatcacgatcgccttctccgtcctcctgaacccggccttctacctcgccgagtgcctggtgctcaagatgcacaagaagagggaggaggacgacgtcgagaacgccctctcgtacgccgccgccaacacgcccggcaaggatgctgccaccgacgaccgtcgctcgtccaagatgtcatacatctcgaacgccgacgccgagagcccgtaccacggcgacgtggaggcggaggcagccgagtaccggggctcgaacgcggtcaagtacgtgaccctgcgcgtcgccatcatcgtggtgctggtcgtcctgtcggttctcctgaaggaccacttctcggacatggtggacttcgtcggcgcctcgtgcatcacgctcatcagcatcctgctgcccattattttcctgctcaagaagctgtggcacgagatccccatgtacgagaagatcccggcgctgatggtgattgtcgtgtgcggcttcctgggctgctacgtgacgtatacgtcgggtaagacgctgttcgctccgacggactcggacacggcgttcccgtactgcgacagcgagtacgagaacgaggtgtactacaactacaccaccgttcacggtgcataaagtagttaccccccttcccgcgcgcgcgctgtagcaccaaagttcataatcttcgtgatacgtttctgaatactcgttcgtttgtcactgacacgttagcttgatagttagaatctgtgtcagcccactggacaaggaaaggtgatgagcccagcagtttggattcatttcgtcagcatgccacttccgattctgaaacacatcaaagttcacaaatccacgctcgctgctcctatgattttaccaacaagaccatgcaggaacgtaataaactgacgccgagactccacgacttgcactaccggtagtcttcaccggtttcgtaggtgccctcatccacggagttaactgccgcgtactcgaatgtaaaatttgcggtaagtgcacggtaaattccaaggttgctcgatgcgcagcaagatggagcaccttgtacactgcgacttgatcaagtcggaatgatgttgagatgtgaaggagagggcagaactctgctcctcctacgaacgataattgagcggaatcgctccgaatccgctgggggcccacccaagtttcgatcaaagaagccaaccacgcccgtacaaggccgttcagcgcacgtatccacacgctcgtcggtcaccgagccgatcaccaccaggttctccatccgtgcgtcaaaccaatgaatttgttcaaaacgaggagctggctgccatcttcctcctccattctgagcagcccgaaggatttcaaggcgtcggctttgtagtagagctttccgttctcccagtggtaaccacccagcttcgtcattttgttgcgtgctccgaaggtcgtgtcgacgcagcaaggtgccaagaagatatcacgtatgcggccatgtttccagcaaacgtagctgactgcgcggagtattcgtacgagcataatgaacccgatgaggcccagcgcgatgacgatatgccccaccaagctccacacatagtatgacactgcaagagcagccggatgcgtattcctcatatccgaccgattgactgacgaaaggtacaagggctgtacaattgcactcaaactttctcccagcagcgaggattcgtagctgaaaagcaggcgcttcacaaaaagacggtaagtttcgcccagccaccccatcctctcgatcatctcgaacagcaccagcagtacaccggacaagttgtaccctagcgagaagtactgcagccagacaaaagatccgtcggtggctccaagcaggaacagatcgctcatgaggccttcaaggagtaaatacagcagcagcactcgatggtagtttgttgctccatgtgctgatagtcgcagattttcgtggacgaagatcatagctgctctttgcccaagactcacgcccatttggtcgcttttgcccccatagcgcttacatgcgacgtagcaccttcgtaacacgaggcccctaaagactatccacgttgcgccaacggtgcagtaccaatatgaccacctgtagccttcactgccgagatgctcggctagggcatttccattgatatcaaaagtcccgacaccaacgacatgggcgaatgcacttccgtccgtagcgcagtatgtcccagtgaactcatcattgaaggagaaatacccaagactgccgtggtaaacgaacatctcaatagaatagctgtcgctcgcgcatgcttcgacttctgcggctttcatcgccaaatttccgtgcgtattgtattctggagctacgaaatgacgcagatatccatgctccaacgcgtaatagtgcgtcatgtccacactccaccacaccggcccgacgtagaagctcgatcaggcttttcgtgattttgtgcggagttgctagcttcaagcagcctcgtatctgcagaacgaaggggatcacaccgagcagcagcaacgccgtcattagcttccgctgggctgtcatgatgctgaatcctggggctagcgctttcatctggtcgtggactccatctcgaaacgaaaacactcgtcccgacttcatgacaacggagcatggagtatagcgcgatgtcgctataaaactcgcagtccggtaatagaccaagggatcatgtgcctccacgtaacgattgtcctggagctcgaaacgtaccaagaaaaaaatagttttcggcgccctaagcgagcgctgcggctaatgagttgaaactgggttagtggagcttggggagttcggtcgacttatggtggagtcaggtgtggcttcgacgatggcatcggatgcgatggatcggagctggtcgtgcactagggactcccatacgacctcatgctgttgccgtgcggtgtattcggacgccagttccgcgagtgctgctccagcacgggacgagagtgagcagagcgtggtttaataaatacagcgttgacgctcttcgtaccttctgggagcaagtcggctacgagctctttagtccagtcgtcgagaatgtcggcagccacggcgagcgccggtggggtcgcagctcgagacaggtcgatcttctgggcgaagtatgacttgaccatggcctgcagcacgtcatggaagacgtcgtggatacactcgtcgatcagcgacgagagcacaccgccggccagcgaggtcgcgaggtcttgtctgcgcttggtcgtctcagcctcctacatgtaagaagttagatgatgatggatggaggcgaacgagcatgcaggcagggaaggctgcatgcacgaaagtaggtccacccacctgcatgcatgtctctcggaggacgtcaagcaagcaagtcggcacgatgctggccacctcctgaagcagaaaaacgtcgagcaggtcctgcgcctgccgtgcgagtcgctggttccgacgatgccggcctgcctgccgccgccggtaaaaccgatactcccgctgcgcacaccaacgttcgaaggaagagcgtaaggtgacaacttcaccgagttgcatcataggttagaataaagcagccaacctggatcgtggtggcggcgtcgtgctgcagcttggacatcgccgcgatcgagcgcatgcgctggctgcgcatggaggaggctcgaggcggccgagctacacggtcgtcggtctcttcatgactggagtcactggcatcactaccgctaatggactcctcgtcgctactgctgctccgatatctccgactgcgccgcgacttgtttcggccgctgcggtggcgccgctgccggccgcgcttatcgagggggaagaccggcggcagcaccacgtaggctagctgcggcctccgtcgccgagcccggcggtgccgaccatcgtcccactgcgcgccggcgtcagcgtcgagctgattgctctcgccgcacctcgctggatttctgagcggcggcagcagcacctcgtccaccggcggcgcgtgccgcagccgtcttcctgcttgaagcaaaaagcaggcgttagatccggcgtgcgagagacgcccatcctgctgatccctccgacaccctcacctggcattgcgctcgttattgcagcgcgcaacaaacggacgacgtagagtcgccggtgccggccaaagatagggtctcctgcccgggtgctggagagcgagatgccggcgagaaagacatgtcggcggcggatggcgcgctccgaaggctggctcaccactcgttctcgtcgggccaagacgcttggctcgacactatgtatggggggcgatgggactcgaggcgatgggaggagcgtgttaaacgcgcgtcgactggccagatctcgcgacgaaacttcagccttcgcgtccaagcagaacgccggtagtgccacttcaaccacgcatacacgacacacacgtacacgtagaacgggttaaatagtggttggtgtgtattctactggcgctggtttctagatttcatggaaatgggggacactgccacttgctactttgctactgcagtcgctgtcgacttgccttggttctcgttggtcctatagatatatagataaatggatggaaaatgacttggctgggctgggcgtggtgaccgtacggcgcttgactggactcactcactgcagcatctcgttggacagctccaggtcgagcgtctcgtcgtggccgctgagctgcacgaggaagacgccgagcaggtggagctgcttctgcagctgcgtcatgctcgggttgtccagcagcttgatggacttgagctgcgtgttgggcgtgcgccgcgccacgtactggatggcgcagcggtcgatctgcgagtcgccgagcgcgatgacctgctgcggcgcgcgctcctgctgctgcacgtacacgccgtgggtctccacggggggctcctgcaggaagccgcgcttggcgagcaggtcgcggtacacggcgatcttccactcgatggggcggtccgggtacacgctctcgaagttggagcgcgcgctcacgatggtcatctgctccagcagcggcagcacattgggtaggaagcgctggcacgagcgttccacccagccggccaggccgttggtcacgatgcagcacgcgccgagcttgaggcacgcgttcaggaagttctccacctccgaggccagctcctccagcacgggcgcgcactcggcgggcagctcgaaggcctcgtcctccgacgtgaagcccagcttggccaggtgcgtgttgggcagcagcgtgtcgtcccagtccaggatgatcactgcagcgtacaagtacacaacagttagggcacgtaggcgaacggtgagaggacgacgagggcggacgtacgcggcgcgggggcgacgtggagctgctcgacgacggccgaggcgggctcctcacggacggcggtgctgacgacgcggctgactcccatgtaatagtgaggtggagtgtgtgtggtgcaggtagccaggaggtcgttgcagagtctggtaaaatcgcttttgcgaatgcgaacgaagcagcgcggaaacgaaaaacgagccggctggcagaggaacaggagcgaaagggcgcccactgtacacagtttgtttcatagcgattcttcaagcggggatagaaaaagcacttcaacgtcatacatttggtgtgagaccgcgctaagtcagtagtgtgcagagccggggatgttttgtatggggcacagtatcttccaaaatcgcgcactgatttaaggtctcacgtcaaaaagcgcaggccgccggcagcgctcttgcaaagttgctttgccgtgccgtcagccgcgctgtgtgaggtcaaatttgcccggcgcgtgctggctggcaacaaagttgcatcgggcaaagcacgtctgctcagctcataccgcgggccagtgttggcaaaaaaatatcgaaggatttttatccacataaaataaaataaaataaaaatattttatttttatttttatccgatttttacatttttatcgagcaaatcgaataaaccgggagctgcagaggaaccgtagttgcgctaatagtagcctatatcctcgctgcagacaatcagagcacaggcgacatgtagcgcgggcggcttagcgtagacaacaagcagtagttgaggagcaagcggtcagcggcatcactgtgccaatgtacctcgagtctgttgcttcgaggcgcgccgtttgcgttgttcgtccgtggcggaggcgagtctggggcgcaagtgctcagagtcgctgatggcgaaaccggtccggctggtgctgtcttgatcgggtctggcgctcatcaacacagtcgagcgggttggtcggcgtagctggcagcgaggcgtcaagtgctcacggatcggtgcgagtgtccggcgctcgcagctcgcacgacgtggctttggctgattgtgctggtgcgactggacagtacgaccggcgcggcgacgggcggcgtgtggacttcgtcaggctcggcgtctggatctggcggtgctgctttggctggcagcatcagcttgtcggtggggttgtctgtcgttgatggtggcgacgcgacattgccagcgggatgagtcaagtggcattgtgttggtgggcggttcgacgctatcgacagcgtcttcgtctggattcgtctgtaggacagtagctctgctgtagagattgccagcggccatgccatcgtgtcgcttgcagtaaaggtgcccgaatagagaacccagtcttgtaatgaaagcggtttcgtctttacaaaaagaaggataacagaaatcgcacttatatgaataaaaatcgaaaaaatattttatggatttttataagcgataaaaatatttaaatcatttttttgccaacactgcgcgggctgcggtccgtgccggcgtttgcgctcgcttcaaccaccacgcagtcccacaaacatacattaccatcgaggcgctcggagcccagctggggcactgcacagatggccgcaaagtagtctgcgccgcagcaagtgctcgatcgccgacaagaaaatctcgaccgtcggacatgtcctgccacaacctcagtctttgcgacatgggcaaaatccacactgttaagaggagccgagagccaggcagcacgagtgtcgaggcacgcaattgaattgaacacatcaaaccacgcaacgagttgcaccgagttgcatcgttaaatatcaccctcatgcgagaggtggctacaccggcagacgcctacttgcggatgacctcctccttggtctcgagcacgtcgtcgtacgtgtggctctgcacaatgtactcgctctcgtcctcgctgtcgtagccgtccagcagcgccacgtactcggcgcggcgcgcggccgccgaggccaggcgcttctccaacagctcctggaactcctgctcctggcggttgcgctccgccttctcggcggccaggcgctcgcgctccttgaggcggtccatctggtcgaagcgcttctcgaacttcttgaggttcttgaccacgttgttgtactcctcgtccgagagcagcgtgcgcgggcgcgggcgccacaggaactggtagaacgcgtccttcttctcctccaggagctgcttgccctggaacgtccacagcgtgtagccgttgtccatggtgaacttgtagtacgagttgtccagcggctggcacacggccgtcgccaccacacggcccgacgggtcccactcgacgtgcgtgcacttgaagtgctcctgcaccgtgatgctctgctgctccgtggcgtcccagaactcgagctggccgttgatctcgcccagaccggccagcacgatgttgttgcccagcggcgaccagtacaggtggctgcaggccttgtccttgagcgtgtacagcagcgtcacctccttgaccgacttgctgccaccgtccatgtcgtagaaggacacgttcaggcgctgctggccctcgccgtgcgccgtggcgaagcgcgtgcccttgggctcccacgcgaacgccacgatgctctccttgacctccagcatctcgacgggcaccagctgctcgtgcacgcggaagagctcgaagttggtgtacatggtcttcttggacttggagtggcgcgtcaccttgacgcacaggaacgtgccgttcgggtgccagtgcagcttgcagtcgctcacgttgaagaggtttttctgacgcacctcgcggcgcgacggcagctccacgagcgacacacgcgcgggcacgttgttgccctcgggcgcccagtaggccaggatggggtcggtcggcgaccagaagaagtcgtgcacgccctcggcacgcagcgacttcttctcgagcagcttcatggacggcagctcgtagatgctgatgacgtccttgccgcgacgcgccacgtacttgtcgtcggcgctccacttgaacggggtcatgaggccctgcaccacctcgcccttggcgcccgtgggcttgccggcgggaaaggcgcgcagcatcttgctcgtcttgacgtcccagatgatgatggccgagtcctgctccgtctcgctcagcgtgaggatgtagttctcgttgggcgagaagaccgcgagcttgacgttcttgtgggcgaagcggcccaccttctcgtacttgtcgccgccccagagcgcaatgccctgcgggtggaacgtggccaggtacgtgccctgaggggaccacagcacgtactgcgagcaccactgcttgtcgttcaacttctcgcggtcgccggcgtagtcgagctcgatctcgcccttgtcgctccagaagagctccgtctcggagccgtggcgcagcacgaacatgtcgcggcgcgccgggtccgcgagccacgtcttgaggttcttgggctccacgaacttgtccaccttgggggccgcgaactcggcgggcgtcttctggaagcgctcgatgtcctcgtacttgttgacgagcatcgtgtggcgcttgtccagcgcgaagttgttgatggtgcgcacggcgtcgttggcgtgcgcctcctgctcgtactcgacgaaggcgaagcccgtggtcttgccgccgccgccgaagggcatgcggatgtccaccacggggcccacctggccgaagatcttcttgaccacgttcagcagcttgccgtgcttggtctcgtccacgaagggcaggccgcccaccacgacggacatgctgtagtcgttgcagaagtccgcctcctcgtgggccttgctcgtgacctcatcctccacctcctcgtcgctcaggtagtcagcgtagtgctcggcctcgcgcttgagctgcgccagcttctgctcgaacgtcgtgggcgccatcgtctccagctccgtcctatacaaacacaagatgattgaccgaccacacccaaagggggtcaaaacaatctacagagccgctcagccactcgttgcgacctacacccgacatacgtttttcaatataagttgtaggttgaaacctatataggtagcattgtagatcggcccgatcctacaaccggaccgttcgttacgcatgaaacggcgcaaggttgcatgcatgttcggagctgctcggtcgagggtgttactgctgcactcaactcgcctgagctcagaagaactctctctatctgtcgcgcacccggatgcagcccgtgcgccaccaccgccggcggaaatcccctggcgccaagctcaagcatgtgtgcgcgctgctgctggtgacgacctccttgtgccaagttgacgccgtcattgacgtcgccgcgcagctccaccagatgcagcagcgcagtgcagcgagtgggagcgcagcggacgccgccgcgccccaggtcgtgcttagtaacgtaccggactcgctgctcgtgcgactcgcggagaaatcggtccgatgggactcactctccggctacctgcagcgcgcgctgctctgggatacaggactcgtgatgaccagcggcggcaggttggtgcaggtgtacgcgccgtgcaacgagtccatgtcggtgatcttgacgcctttcgacgcgtacaaaggcaaggactgtcggatggaaacgtgcgacttgacggggctgtactttgcaggttcgacatgttcgcgcacgaccgtgtggaaggcggcgcagtgcggaattgcagcagtggagaagaacgcgacggatattgagaacgctgaagcatcaacgttgtggtctgaagacggagatctggcgggcgtcccggatattcgactgtacaagcacgtacaggacaatagctcaggctccgctggcgttcatgaagtcatcggttcaggctctgaagacgactacacaattgaggccgacgttctcttcacgatcaaccagatcgcgccgctgccgtggaacatcgagagctgcccgggagactcgtttttcgtcgctccctgtgtggagttcggaacccccgacgaggaccctttcaacccctggtgtcttccttctcggggcgggtttgttgacctgtggctcgagagcgagatttcgggtgaggacatgtcgactggtagctcagcaacgtcagcctcagcgctctcgactgacgccagctcgagtatttccggtgatacagtcattctcgtggtacttttcatcctactcgcagcggccgtgggagctcttatcgcggtgcaggtgaaccgaaagaagaaagacgacgacaagagcaccgtgtcatctccgacggtctacgcgagcgccacaacaacgcgctcgaagcagaaaaccaacggcatgaacagccctcggaattctctcaatgaatctcgacggcggcggtcgattgagttggcaacgttctgcatcgacgcgagaattacgtccaagcgcattgcatacgactgcctcacatttgacaagcttattgcccgtggagctaacggagaagtctggaagggtacttgcgggtctcagatcgtggccatcaagcagctcctgccggaaaagcgtcacgatgaggataacgtcatgctcttcgcgaatgaggtgcgactcgcatccactctagagcatcccaacatcgtgcgatttgtcggtttatcctggaaccgcgtgtgcgacttgtgcatcgtttccgagttcatggagcagggagatctgtccatgctgctcaactcaaagcgcaaggatgaattgtcctggtgcaaggaaaagcttggcatagccacggatatcgccgaggcattggcgtacctgcacggccgacagccgatcatcatccaccgcgatctcaagtctctcaacgtcctgctggacagtcggctgcgcgcgaagctgagcgacttcggtctcagtcgcgagcgttcgtcggacgacacgatgaccaacggcgtgggcactttgctctggacggcgcccgagattttgcgcggtgaggcctacagcgagaaggcggacgtgtactcgtacgccatcgtgctatccgagctggacacgtgtttgccgcccttcacactcaacgcggaggtgagcgagcggcacctgaccacgatgcagctcatgcaccttgccacgtcgggccaggtccagccgcagctgcgcgaggactgccccgcgccgctgcagcagctcacaacggcctgcgcctccttcgagcccagccatcggcccaacgcgctggagatcgtcttcacgctgcgcaacatcgcccgcaacatgagatacgacactgccagctaacaagaagcagccgtactgaagccatgtcaagtataatagctacgtgtagtgatgggccgtagcgaacgtacgcacactgaaagtgtattgcatctttttgcttgatctacatccaagtcacaatgtcgttgcctagcgctgatagttctcaaaaatgaccaaagtcttgcaaccggcgaggctagcgctcggcaccgacatgatgaacagcttcaaggtccaggcagcttgaggagggcaatgacgaaaagcgagttaatctcggcggcggcggctcttctgaggcgggcttgcggtgctgcttgtgcggcgggagactcgcaacgcttcaacgatcggcgcctacatacgcaacttcccgactgctgccgctcttcaaagtgacaaaggactttagagaagctccgccacttcgcccgatggcctctgcaaagcttgccaagcaagcaggtgagggttccgagcggaccgcaacgacatcgtgcaggtcgtgtgatttcgtggtcgttttatggccgaaagccaaagatctccccatcctccctatacatttggcaagtcacatcaaccctagtcactatacctaactgtcaatttggagctcgagctcacttgcctaagctaggtactaaagacagccaaagcgatcgccgccgccacctagcttgccatgccgaggtgtccgacagcatgtcttcggcgcgctggcagtctacgtgccttccgtgaccgcggcggcggtcggtggtcccacctcccgccctctcgcaattgaaccctttattgtgcctttcggtcattttgccgagtcctacgtaggactttggaggtcagttaatctgaggttgggggtctctaaatctgagatgcaaatctcggacgagtttgatgagcggtctcccggaggctctccgttcaatggacgtccaagccaagcaagctttgtttggggaagcaatcagtgctggaacccacgaaggcgaagggagaagacttggttgtttaatgtatcgaccgcatcgtgcttacctaggtttattctgcgtcggacatacaccgtattagagtcagctcgtacgaaagtcctgccacaagacttgacaggagtccttggtaagacctcaaaccccgaatgccgtgagaatgggcgacattcgggctttcggctgtttgtaggatgcttccatcggactagcaattcttggtcctaattccctatgaggggcccgctaatctgctccgataacctagccccatcttagtaggtagctgttttacacgtccgatttgcctaaacaactgaaaagcacaataccacatgcggctacacgcgacttgctttatgaagtaccctggaaagtaaggtccctatgtttgacaaacgatggtacttacggcaccaggatgaacgacgacgacgaggctgggcattttgacgtgaacgtacatgtacgtgtacaaccacgctcgctaccttagtgcgccaccgagttttggcgccgacgtcgagatgtatatgactgcgcacccgccacactaaagctgaatttctcgtggttgatgcggattctcaatgctaccgctgacgctttttgtacgataacttttcttaacgatatattttgcatggcgactgaagttgtgtggagtatcaatgtagcttcggcaatgctacgcaactgagctcaagtgatgagacacaaagaaaacaagatgtgacaccggcaccatgcttacgagcctagcacgctcgcaggttcatgtattacacggcgtttccggcacgcttgctgctgaggacgccaaagccttaatagcaaggttcgccccacaaaggcaaacatacatgtacaacttgcagcaagcactgcaagccgagtccgtcgcgacggtcgcccgattgcagagggcgatcaccgatcgcaaatcgctgcaacctttgtcaatccgctcacgcttgtactttcgaggtcggtcccgtctggacccaaaaagccggcagcaggccccgactcggtcattccaaaattacgactctgccactcaagtcaagtcggcgagggccccaacattgcgcgcagtccgcagtcaaatcgcatggttccggtgcggcggcgcggcgccttcttcctgctcgcgcgctaccggcggcgacggcgccgcacgcccctgggcgctatcctgtgtctcacatgcctactgctgctcgcgcgcgacgtgcgcgccgccggggacctcgtggcgcggctgtacaacctggagacggcgggcagctcggccgccaagctctcgctcagccccagcgcgctgcccagcgccgtgagcgaccggttgtccagctactcgctcgcgtggagcgacctgtcggggctcatgcagcgcgcgctgctgtgggactcgggcttcgtgttcgcgtcacctgtcgggagctcgtcggcgtcgggcgcgggggacgacgtgcagctcgtgcagatcttcacggcctgcagccaggggatgggcgacctgctgccggcgctggcggaggtcaagacaatacaggaatccacagacaacagcagcgcctgcagcgtcgagaactgcggcattattggacactttctgcccgcggcttgccccgcggagcaggtgatccccctcaccaggtgtgcggtgtacgcgtcggccatggccggccagaaacagtttgcgggggtctactgggtcgaggacggacgcagcacggccgtgcctgagcccgtggtgaggcggcatacgcccgaggacacagagccgagcgacgcgctcttcgccgtgcacttgacggacgcgagctttacagggaccgagtcgtgccagccgcacgtggagtttattctgccgtgtcgaggcgtggcggatgacgtggacatcagcagcagcagcggcagcaccagcctcacagtcaacggcagcagctttacagagatcgacctgtgtcaggcctcgcccagcgcggcgatggacgcgtggctggagctcgagtcgacgccctcggcggggacgttctccacgacggccatcgtgctgctgtcggtggcgatgctgatttgtttggtgctcggcacgtccgtgtggtggctgagccgctcgcgcgcgtggctacaggacgcgtacgaccgcgcagttctggaaggatcgtgggacgacggaagctggtcccccacctcgcacttgctgggtggaccgctcgctccgacactggccacggcgggagcaactgacgaggaacgactcactccgatggaggtgttcttcggtgcgagacccagaagccgacgctccccaggcattcgcggcggtacctcagccctcgtggccaccacgcgggccgagatcacgctatccaacgaccagctgtgccggaaaagccctatcctgcgcggttttgtgtcagacccagccatcgtgacgaagcgcatctcgttcgcacagctccacttcttgcgactgcttgccaaaggcggcagcggtgaggtgtggctgggtcagtatgaggctcgctacgtggcaatgaagtgcttgttgcctacgaagcgggaggacccagaggcgctggaacagttcgcggaggagatcaggatggcgtcacttctagctcacccgcgcattgtcgcgttttgcggcgtggcctggcagtcgctgttacacctttgtgcggtcacggagtacatgccgcgcggtgatctggagagtctgttagcgaacccgatcgctcagaaggaactgagctggagcagggagaagctcacgcttagcagtgacatcgttgaggcgctcgtgtacctgcactcgctcgtgcctatcgtgattcatcgtgatctcaaatccaagaacgtgctgctggatcgccgactgcgcgcgaagctgagcgacttcggactgagtcgtgagcgctcggtggaagacactatgactaacggcatcggcaccatcctgtggagcgcgccggaggtgctagagggcaagcgctacgacgagaagagcgatctcttctcctttggcgtggtgctgtccgagatcgacacgtgcgctcttccgtacggcttcagtcgcaacgccaagatgcgcagtatgcagatcgttcacctcgtgtcggagggcaagttgttgcccaatttccgtgacgactgtccccccgcaatccgcgcactagctcagcgctgcctgagcctggatcccgcggcacgaccgacagctatggaggtcgccttcgaacttcgttcctccatcgcgccgcagctgctgaaacaaccaatgccgacggtggctgacgacgacactggcagtattatctcatcagcgtcagcgccgtctcccactgcagcacacattgacattgaagacgacgacactgcatccgcaccgccacccgcacctgtaccattacactctaaagttatcgacgtagatgccaactcgaaggagacgcagacggagccgtgagcagtcgacgaaaagcactaggagcgccaacgttggcaactcgcattacagaccaaaggaagcccattaatttatgagaaagaagcttgtacaaaccagatcgaacgctgttgatccgccagcaatagctgggtgaagacactgacgaaacggacacgatcacttgctcgatgagcttgtggccaaacttttgactcggcgtgagtacgccatggacagcagtaatgagagtgaagctgctacgcccgaagccgtgcggaaagcccgcttgattcgtcgagtcccgctcctggcgcatgtcgtgaaagagggactctgtccggaaggtgttttgctgcgatcactggagcccgtgacttacgctgatggagagtacatttattgccaaggccagcccgaacgtgacgtgttgttcatcgaggaaggcaaagttttgatcacgcagcgtcgacgctctcgcgctatgagtaatgctcgaccagtggggtttatccccatggacagctccggtggagtcatcttcgctcgacggagttcgtggagacgttcccaggttgaagccgagatggagattgagttgcacacgcacgaggagctcgagtactttggcgaagaatcgctgctgcaaggtctggtgtcgaggacgctcaatgctgtggccagtgggaatgtatcgtgttttgctctgcctgaggcggctttcgctaggttgctagcgcctgtacacgaattgatgttgcaccgtcatttgctgcgaatgcatggagtcctggcgaagcagcgagtgttccagcatttttcagctcgccagaggcagtatctattggatcgctgcacgctggaacactatgaagaaggagggaagattatacagcaaggcgacaaggaggacgatcggtatttcattttggctgaaggtgaggtggatgtggttctggatgagcctctaagagatccgagacgaccgaaaagcgcagtgatagtgggtggagagcaagcagtggaagaagaggacgcgaaggtgggagtgagaacgtcggtcgtgtgcaggaagacactttaccaaggatttggagaaatggggatcctgtgcagacctcgaacagcgcacgtagttgctgcgggaagcgtcatttgtgttggtatttcacggaaggggtacattggcgcttctcagttgaatggggttagtgcgctggacgctgatgccgaggctttgcttgccatgtcattgaaggaagagtggaatctcgttgtgaagacgcgcaatttgcacttggcaaacccctcagtatctcgccatctcgagactttcgtcaagaagttcaaggcggcctacatgcagaagttcgaaggaaaaacgctgtacttggatctattgagaaggatcaacgccgagccgacacttgcgggcgagtttccgttcgtgtcggaccgcgtggcttgggaccagccagcatcttcactcagcatcacgcgcgcggagactcgacgcattctgtcgttacctccagccgagcgctccccgttcgagatcagcttcatggctcgcctactcgaacctacagcgttcgtcaacaagtttgatcgtccttcccacgtggatacactgacacttgcccggggaatcgctcgctttgcaaatttcctcaccgttcagaaggacaagttcctgttccgacagggcaagatcgaaagccacgccttccttatcttgagagggaacgtgaatattgtgaacgaggacgtcaacacgctgcaaccgggacttgcactcaagcagtacgatgtactggccacactatcagctggagacagttttggcgagttgtcccttgtcactcgccttcaacgatcggcctcggctctggcggcatgtgaagtggacttgttagtactggagcgtccgcacttgcaagccttaactgagatgatacccggcgtatccgtgcaacacgccatggtcgagtgcgcggaattcctcgcaacgctgagctttcttcgcgatagcgacttcgcccagtgcatccgcgtggcacacgacctccaggaccaattctacgaacctcgccacattttcctacaagaacccgtgcacttgcgcacactttacatcgtcaagagtggagaagtgactgtctatctgcgtcgaattgtgccggtcgctgaggtcacagtgaattccggagcaattgactcgacctcaactaaagaagtgctcgttcgagtggccaccatcggaccgcaagagtttttcggcgttgcgattgcaagtgccaacatgttatcagccagtggatcagtggcagcagcaatcacctcagctggagctgccacttctcctgcatcgaacaatgccccccctggatcgccacctcctccatcctcaccaacatcacctgctgcatcatcaacaacacacgccaacaacaactatatcgccgccaccttagcgtcagtgacgcccacgagcgcggctgcatcatccacctcaaccaacgttgaccttgccagaaccgtcttcatgtgttcgacccgcgtacaaatgctggaactctcggaacgcgggtggagacgactgccattggcaagtctgcacagtatccgcaactctctcctcgaacgccaccgctggaatctcgaaacagtggaaaagcagcagcaacagggcaatccatccttctttgtcgtggacaaaccgtggcagcccgtgacccgtccaacgactaccggatccccgaaaaaagccgctggagaccttaaagactctcaaacgcgggtactggagccgttgccgacgactcaattggctcgacggataaaggacaagaagcagcaacaacagcaacaaggccacaacaacgccgtctcgcgactattttctcctgctccactatctctaaccaaaccaagcggacgaccatgcgttcccaacatttccaccgagcgcaatacggcaactctatcgagtcgcgggcccccaatgtatggcaccagtccaccgaaagtatcctcgccacgttttgcaacacgccaggagaatgcgcagttcacgccggcaactttttcctcctccccgactcggttaagccaactgggagggtctttccaacctaaaagtgcaattgtgacgtcgtcaggcagcgcatctgttgcatttttcagtccgccaaacacggcaaaaccacttgcaacgagtgtattggccccacgacctccgtcgacggcatctactctatcagtgagcccaagtccgcgcagatccagcacgaacgcatgcaccccaaggcaagacaatgacagcaaaagtgactttaacgccatgtggaagttgcagcgcagaccttccacatcgaaaccttaacttaattaaacccctgtcatatccaacgctatcacccttgctgttgttgccttgcacgaaccgttggtgttgaagttttcatcttcccatccgcccaagcgtcgtatggttttgggaagtggttgaactttttcgttgcggttaggcacagcattccatttccacttttcattcgctattttgccgaccaaaggaaaggatggagagtgtgtcgctatcgctgtccccgccgctgggggcctgcgcgcccgtgacggaggcactgcccgcgcccgccgcgcgcttccggctgcagttcaccggcgaccggcgctccaaggagctgcgctgggtgctcttcgcctgtacgtgccgtgccgacaccatccctaaaataaaatgcaaatagggtgtacccatctctaacgctaacttgaaaactctattgcagccactcagcgcggcgccgtggggaagctcatcttcacgttggagaagaacaacacagcccacgtcaagtctgtggtggtgaacaaggagttccgtggcctggggctggcgcgcgtgctgtatctagcgaccctcgccacgctggaggagaagcaggttagggcgctctatttggaggctgaggaggacgcgaaacgccacgaccgattggtgggtctctatcgcggttggggttttgccgaaattgccgacgctaaagtgctcttcctctacaacggcaacgagtgtctacgtaaagtgccgatggtgtcggagttccagaaaaacacttttttccccgtgcgaccgaaagaaagcacttggttctgcatgatggcgttgcagaccccggacggcacgtgccttgtagcgggggaggacggcaacattgaagtgagctcaaagggaaacaatgggtgcatgtggcagacccttttaggtgcaacaggggaggttttcctgcgcagtgtgcatggcaaatttctgtgcgtggaggaggacgggaccattctggccgaccgacccttaaattccacgtgggagacgttccaagttgtgccgcaccatgccgaaagtgcagcacaagttgctggaggtgttgcacttcgcagtttccacgggagttatctgtgcattgatccattggagaaacaggtgcaagtctcggaccaccccgtgccatgggatggaggggagatcatgtcgttggtctgcaacaaggcggacccgcaccctcttttcgtgaaaatcatgaggaagtaccagaccgctgcgttcgtaaagacccaagtgacgaagtatggggatttgggtcatgctcggatgtcggtgcccgaagcgtgcaagtgcgtgatggagctgacgggagatgcggagaggcagaatagctgggtgatcaagtacatgctggccactgccgctgctgtgaaggacgacggacacccggactggctgcaactcgcagtgttcctgcgagcgttgggcatgctcttcttgtgctggacggacgacgacaacgccgtgttgcgcagtatttcggcgcaggagtggatgaccaagaactcgacgtgggtcgttggcgaacctattcccagctcgatcgagttccccgagctgaacgagctgaatttggaccactccaatgctgagaaaggtggtggtggtgcggcgggccactgcggactggagaacgtggtgctgccctggaccccggacgagtatctgcaccgcgtgctgtctcgtaacaagacggcgctgcctgcagaagcgctggacgtcgtgcgcttctggtccttcaagacctggtacgagcaggacaactacgatgatctgtgtgcgcctcaggacatggacaccaaggagtggatcagctcgctcggcagagcggcgtgtgtgtcagacgatgccgtgcagaagatcagcgttgagggcgagcttccgtactaccttgggctcgtggagaagtatctcccggaagcgctgcggtggtgaatggaatcgagatgtgtgcgtgtgcatcagtaatttttataaatggatgttaccgtagttttctgatagtggctagacggacagaacattgattaggtacgtcctgtccttcaattcatactacagaacaatgcacagaacattacctgtattacgctataaaataccttgtaaaacgtatcacgcacgcttccgaagcgaatcgcaagtgaatatatcgccttccaattattggagctagttcccgtgttgcagcacacataatgcagtactggggcacgtgcccagcggcccagcactgcactgggtagtatgggtaatgctggctccgctcgcttgggcgtcctggaactggtcgtgggtggtgcggcctctcactttgaaattcacgctccagcactcaagtctcccaaaattaccatgcatctctctcaaattctgctagtggtcgtcgcttccctcctggctaccagtgaggctctttcgacggccacgattttcaaccaggtggagaagacgacttcactcggctcccagcgacttctgaggacccaccccgattacaaggttgccgacgatgaagctgagaccgaagagaggggtccgctctcgagggagcaaatgaaggcgcttgtcaaggaggtgggcatcgatcggaggaaggtcaaggctgactttaaccacctgctaagacacgaaaagtacccggagtaccaaagactgatgaacaatgttcttgagaagcaaaggagcaagggtgcccccgtttacaagaacccgtaacttctctcaagaccagccagcaaggttatcgctgcgaagtgcctgccaagtcctgaacaaacagcatgtggaaccgtatcgtttagaatagagatagcacgtatggattttcgtagggctaaacgaataactgaacgtgtctcgagaaaaatattgtggtgtcttgctaagcataattttgtggagagcagcgctctttactctcgaagtactactactattacatgtagtagcacgagttcaatttctcacttttggattagctatcctcgtgtctttactcgaaagttcgatccgaccgaaatccacaaaaacgaggagcattagcgcggtttgcccacgatacaatttctgctattcgcataggcttacaataatggctcttcaataacgcaatgttcagccggggcgagttcgcatgtgagtccttaaccagcgggacctagttcttttgcatttcaagaattccgttccttatttttacagtaaagccgctgatctttactcgctacgacagggatatcgccaactattttctcctgtgcaaaggcagacatctgacttgacgaacacacaaagctatggacaacaatttcgggcactcgcgtttttgatcgctgagaatcggaccagccaaatcctatttaccttttacgatagcggcgtgaaacagctcttcgtcaagtgtagatatactgctgtcgaaacccgatagaagtatttgttttagttttaggcttttaccatacagacccggtgaatgaatgtggtcaaccattgggtgtgtcattcgctagcgcaagagtactccctcactcgacccgattttttcccctgaaactccatcacgcggtgccatcacgccaacactgagtacagaagctaacgcattaacttacaatatggcgccgatactccgtggccatcgtcatcattaaacaaatggcagccctgctactcaaaaaggattatgttcatcttttgtagacattcgctatacctctcgagattttgctggttcaaaggatcagccttcagctttctgcaatcaactttcccttggtcttccgagagcggccccatgtttcggtctcagcttccccattaccaacctggattagggatctgttaggagtcattgagagaagagatcacccctacttggttggagtcgtgagtgcgctagcacccaaaaagaaagccgtgatgaccaaagcaacttgtgagcgtcgcatgaaggggctgcgggaactagagcgtgaattttcaaagtgcggctaggaggtattccgtacgaaaaagaacaagcagtctccaaggcatcactagctctatagtgtttctttctgacaagaaagcacaacccgatcaggtcctgtacatgtagtgttcgcacaaacactaactgcatagtagctgatacttgcgacaacaaattgtctgtaagtgtaaacctggctattaaatatggttgcggagttcatcttgaggctttttattagttgccgaaagctgagtgaaatgagaagatcttattctcgataacactgatatccttttgccagatcactctggccacgcggtggtgcgtatggattagataaccgattccaattcgtttgaggatttcaagtgctactgatagagcgcaagcatacaacgcgtttgcaaacagctcttacagtgacttagtgtattgtgaatgccaccggtatcactaacatgttttcggagtacagtgttcatttctcacgacttttggccaggcataatgactctaatcaacgcgctgtcttcaatcggctacatgaagcttgttttaactcttatccgccttatttcagcttgcctagaaaagcaacctaagagtcctttgcttgcgggacttctttgcttcccaagagttttttctttctttctgggtactcgctgtgtgtggcttgctttctgaaactgggggtttattttcaatacaccgttcacgctatttagtcggaccctgactaagtgtggtgtacgatttttgagggggaaagttgaaatttcaaaatgttctagtgacgtcaatattcagtatttcagaaatctaagaccataattggcttcggcccaacgagatctgtccaaaaaccgccgtctttgtgatgtttcaatgtcctggagtaaatttggttacgaaaaagtacggaagcacgactattgacgaactacgactcaataacgtgaacggtgtagctgcgtgaagtcacgagaggattcccaactaatctaccagcataactatcgttgtaacggtgctgagccagcactgctgacgaccggagtggaatcgtcaatgatatctctggtctcggggtgtatcgggccttgccgcaattcgcatgttgccccttatgagatgcatctacatcaaccaatcatatgaagcgatctacatattgttatccaatcagaccaattatcctggtagtgctactctgtagtacgagaagcccaatagggattaatttgaggcttcaaatgtgtggcccacagaaaaagtaggtactggaccaatacaaatttcaagtgtaagggtcttttaaatctaaaagtttgcattgaaagcccaaatctacttatttacacaggtttattacgaaatatagcaggtggaggcttaaatgatatcttacgttaacgttttggatattatctggtctattgtgttagggtgtattggataccttacttgagaaaacaatcggggagtaaagtgatcgtttacagtatggatgggaccaacttcaacgtctaacgaaaaatagtagctgttttgaattgaaaatgtcttgattagttaaaacctctaatcagttgagtatagctctgggatcgcggtgccccgcctattcaatcttcagctccggcctagtagagtctctcgtggtcgtcctcggtcccagtagttcacacagccttcagcgcttgagccgaatggagcatacttcctttacacgtagttccatgatcagttggtgcgcgttgagcgcctgtacccgcgcgctgaaactcgtcgacgccgtcatcgtcgtcccccgtgacctccacgccgctcgctgtggccgccaaggaatcagacgtcgccgcggtatctgcatcagcctccgctgcagtatcagatgatgctgcagtcccagtggacagcgtgaagatcgatctgggcactgagaaactacacgaacaaaaaaatgtttggcatataatggacttgatgagttcttcgtagcagcgcgctcggtaccacggcagcgagtatgagcccgctgagggtgggggctaccgcagcgaccgagcacgccgcgttgataggttgcatggtagattggtagcttggtagatacgtgttcttgacagtagcgcgctcagtgccacggcagcgagtttgagcccgcggagggtgggggccaccgcagcaaccgagcgagaatactcgccgacgatccgagacatctaaagtcgcgcaacgtcaagtcaggatctttcggaattcttctcagcacttttccggaatatattttatattttgattccgttcttaaactgatgtgtaacctctccaaaaagcaacatattatggtaccatggtactataattcatgaagcatggctgtgtttatttactctatactatgcgcttttggcctgtcaaaatttcgcgttttgtgtttcaactagcctctaggacgataattcatcctgggcctgcgttttcattgttgcttatctactttgtgcgtcactaatagttaaattgtacgcaacaagttgctggtcggagctgtacagtggagcgattcgcaccccaagctatcccggcctccacgtaggtcttctcgaggcttcaaataggtgcggtccgtaaaactaatatcgccccagtttctgtacggaagtatttcattataattgttctgcgcgaaaacttccggaagttcggcattacaaaaagcgctaccagcccaactctctagtggttgcggcttatcctggagtaaatcacggcggggatacgcgtaaagtcaaaacaggtgagatctagagtgcgaggtgttcccaacccttgaagaggcgcagattggcatcgacgtcttagacggattccactacaagtacaaacacaactacggcaatgctggcaacggtactcgtatctactgctgcatgtcccatgttaattgccccaaacggctgcggctgtctaaggtggaaggcgaagcccaggacgaaagcggagctcagttggttttggaggagacagacatgcatggagacgaagatcaagacactcagcgccgtggaattcacggtgcgctgaagcgagagatcggcagcattctgttcggcggcgctggaccaaagaagtgccggtagctgctgctagatcatcacggagacaacccagtcatgcttcagcatttacccacggaaagtcagctcaagaaccgaaaagctggactccggaagaaacagtcaggtatgatgtttttggcagctctgtactttattttgggttgatagtaataattctgaacaattgtggttgtcttgcatttggttctgccacaggtgggtgggagattcacaactttgcgactctactagagtgggcgtacacacatttgtgtacatcgaagagtgacttctttggtcacgaagacgacatcagcgctgcggacgccgcaacgcagtttgccaacaagtcccgccagtttcagcacggtgtgatcgttcttgagtgctttgaacacgacttcattgaccaggatggcaaggtagcaaagtctttcgggctcatattgacttcgcgtcacatgctcctgaacattcccaaggcctacgaatgccggcgggatattggcgtcttgggtgctacggatggaacatataaactgcatttcggtaagcttcgaggtgtgttactagtcgtggcaaggtgcattagctgaccgttttctctgtttttgtaggtggatggaccctcgtagactttgggacctacacgacgcactattcgcgaaaacagtactccaaaacatttgtcccttggatgtatatgtttgtcaagacagagcatcagacggcgtacgcaacgctttttcggactgccaagcactttacccgactgtttttcggagtcgatttagcccttgcctatggcagcctcgataggacccaaggcattgcgaacgcttgtaaggaggtttggcctgatgtaattctctttaattgctacccgcacctcgtgcggaaaagtcgagagaagatcaagctactcaaggaccctgcgttctacgaagacaacgtgctaccggacattcgctatctcagtaaagctcgctcggccaagcagttcaaggcgctcagtaaactctttctcgagttttggatccaacaaaacgagcgagactacgccaagtggttcgaggacatttacttgggtgacacgtgggggaactggttctacgtcgccgccgccgtaggcattacaccgtcccagaatgcccttgaggctcatcaccgcgtgatctacacctttgccaatccaagttggcagaagtgtaaggcaaagccgagagtcccgtaaatacgaaaaatattgttttcaaaaatttattttcgaggattagtacagaccaatgtggatttagtccacagcaaacatctaagttccatactccatgggctcacgaatagcagcggcgacagaccttgcgtccgcttacagtacaggttgtagttggtctcgtcataatacacgataaaagcaccgttccgctcatgcttcagcaacgcttcaccaaacaccctcctcttctcgatatttacagcattattgcaggtctcgggctctacgcgaacctatcacagggaacatacttagtacagtagatggtaaaagtgatagcataataacttgaaggcgtacctgcttaacagtgtaaagcttatcgcaaagcttcttactgatcaacgaagtgctgatgtgcaccctgaagtcgaacgcaagcatttcctgcatctgcacgagtgtgtactggcagttgtcttccaggtagcccacgagagcttcctccatttctggagtacacttcgtgcacgccgcccgcgcgccgcctctcttcttgacatcagcggcttggcgctggacgatgttgcgggcagtactgtactgtactgtgcgggcagtactgtactgtactgcccgcaacatcgtccacaacctgtactgtaagcggacgcaaggtctgtcgccgctgctattcgtagcgagcccatggagtatggaacttagatgtttgctgtggactaaatccacattggtctgtactaatcctcgaaaataaatttttgaaaaaaatatttttcgtatttacgggactctcggctttgccttacactactgccaacttggattggcaaaggtgtagaaggtgtgtgtcgggacgcttcgggcaagcacatcggtcgtcttgaacgactcaattcctcgtattcttggtctccaagaaagcgagccggctcgcccagctctaaaccacttctcggaaggtaagatgacgtttgtttatcatttgctaatggtgtgtaccgattgattttattattcgtgtatctcgtgcattctaggtccgttcatgagtggtgtagtagcgcgcgcgcaaacgcttgtccaagagaagtctaatcactacatgatcaaggacacacgggcgaagtttgtgaaggcgttcttgtttaacgcttccaagttcgtggtatcgcccaagaacattcacagtgctgttttgaaccgcgaccgtgccacaatgtgagtattacagctgtgcgagtcaaagttgttaagctcactatgtatttgtttcattttggcagctacaggaactccatcaacggcaaactaccgccagggatggctgtaaacctggtggaatggcactgcttgtccattcaccaagttcgattactgagctgagatccactgctcgatcgtggaatgataacggctgcaccatcaatcccctcccaaacagtacgttcagtttgatatgtggtagtagcacacttaggcgatttggatctgacactgtcactgcggttttagattcaggcgattcggaagaagtatgtgtgcgactgcgccctcttttatcaaacagggtggcaatgctcccatgtcgtcgctgccatgacattgcagaaggagatcagcattcaagggatgctaaaggcgttaccaacgagaaagctaagtggtgggcagcgcaagcgcgtgggtccgctcacagaaggcggagacaacactcaccgattctccgtcgacgtgctgattcgagagttcttgaagtaccctgccagacccctacattggaacctcatgaaggaattcaaaattcccgatgactccggtagtgaggtggagcagtttctgttgggaaaggggatctcgtggggagagaccaacggcgtcttcttctggatgacgaagttttccaacggtgcgcaagtcaagctggagtgccaagagttagccgagtgtcttaacatacctacacccatggtgcagatgttgctggagccgtggcctattaaggcgatcaatggctggcgagaacaactcgaacgtgctaggttgtagctagcatttttttcattttgcatatcgagtcctacgatccattttcgtagacaacaatacacgtttcgttacattttattcacagttcttcgttgttagcaatacttcattcgtaaccaatttctgaatagctttagttgtttgggattactcgtagtgcctctttttggtgtgttactcttagtatcgccaattttactcgagattaaactcgttcgctctctagttataccagaaataagatataaccacaatattacagttgtgacttatacaacatgttgaattttgtataagatacttttaagtacgaatacagatcaaggtgaacatagggtgcagctctctacatgcgaattgcggtagttagctctttcagtttaacgcttggtctttcaaaaaatatatatttcgtgtatatatttttctagtatacatccccaatgctcaggcatcaacaaactaggatattgtgcctaacgattcttgaacggattttacaggaccaggacacacaaaattgtagtattttgtccaatcagaattaaattaaacaaggacattttgaaaactccatttaggtactttggattgtttatgtaccaagtgcctagtttgttgatgcctgccaatgcatctgcactaacttgagctgagagtcgtactgacgatactccgcgttactggaaaatcatcgctcacctctgctgatgccgagtaaatcatcatgccgccatacccttcttgacgcgcaaacgtctcccactcagcaataaccgtcgcgttcggtccaggtccatacgcgcagcctccacccacacagaggccaatcgttgccagcgagaagttcccacccagttgcgtcccccacgcagcaaacgtcgtgctcaccgcagaggcgtaaatcgaagcggccgtttcattatccaagttgacgttgtacgccataatgttcacccagtcgacgtattccaatactccagtggggaagcaacgcgagtacgccgcagtcgcctccgctgagcaaacggacgcgtctccttcatagaaataggcgtcataagtcaacagcgtcgacgtgtcaccagccgcatccagagcttctcgcgtagctctgagcattccaacagtccgatccgcactaaactccgccccgacagtctcatcgtccagatcgatcccggcaaacccgaacttggacactaaagccgctgcagactgtgcgaacagcgtagcatttgcaacatccgatatgttttggttgttggttgacccaccaatactcgccatggccagaatgcaccgatcgtggagctgctgcacacactgcgaaatgttggcgtccgtggactggaacgaaggcacgacgacgccgtcagccacaagggcgaacccgaagacgacgtgcgtgactccgtccgggacagtgtcgcacccagccacttcactctgccagaaggcaacggtgcggtctttagcagcgacgacggggcaagactccgacagtgttgaggacgatgaagaacccgaagaggaactggaattcccagcgttcccagcgctggactcgtcgtcggagctgctggatttgtgcacagtcacggctactatgacgatgacaattacgagtacgacgacacctatatacgaggtaagtagatattggagaccgtcgttgaggtcgatataacgcaccacagacgactgggatcgccttcatgagcagcttcgagcgctctttcttctgtggggccacgcttcggctgtaggacgtcgacaggaacgggcccatgtcgttgggcgggtagtagcacgccgacgtctccgattcatcctcatagcgtcggggtggggaccgaaccatcgctttgggccttgtaactgaagcgctcaaaagtaaaactgaagtactgtagaaggagagggtgctacagtagtgctgctgcgtgcctggcagagggaaactgggctgcaccttccacacggcaccagccacttggcgttgggcgagtattgtcgccaggaacacgagcagcatctctcccatttctaccatccagtgagagagcgcgccagatggctacattctcgtgctggctgttcatgttgagcaggggcttcttcacatgccggcaggcaccatggcagagaccacttggcgtttgtctcaatggcttagaagccgcaaggacagtggccgagcgctgtcaacgatgcaggggtcaagtgttgcgtggataaattcggctcattcgttactgctgccaaggtcgctcaacagcgagaagagtccagtgagccccgcacgatcgcagaactgcgcagccgtgatgatcaggcaccttctccacgtgaaaagcttacgccaaagtcgttcgagactgtcgtggcctcattctacgtttatccaggccggcgagatgaatcttctttctccgagcgccggggatgacagcgagtacgaaatcgcttggagctggacccagggctgtcaactatgctcgagaaatacgacgcactaccaggtccttccgctggaactggcacaggagagcagtcgaaagaggaaaagaaggccgtcgggaggagattgtacacctgcgtggagtagtggaggagctatcggagacacttcggcaggagagagcgaaaagcggcgtgaggtcgtgcttccaaacagcgggaggaacaccgtcactgatggaaagtctagcgaggtggcagctagaacggctgcaaagtagcaccgaggaaaacacgcgatagtgcgccacaacgatctggagattaaggccatcgagcgagggttcaagaggcggcttcgagcaaccaacatgctcaccactttcaagcctcgactgagcacggcggatactatcctatcgctgcgaaacattcaggtttttagcgacctcatcgcgggaacggacgagagagatctacgcggggctcgacaatttcctggcgcaagccaagatgcacgaagtcccgtgcccaggacgacgaaacaactcggcaaagtaccggggcagatgcgtcttcctggagctattggattgctacgcagttccattcgacctccgacaaacggagcgggcgatctgggcgctcaaaacgaccccaatagggggctccgacgctgtttctgctgaggtactgaagttgctccaattgtcggtgggttctacatgctgacagtgttattttgctgcagatgagaacacccgcatgaagagcgtctgtgccacaagtgtacgcgagggaaagccgatgcaagtcgtcgcacgcgccgtagttcgaaaatacgtggagcaggaccgcatcgttttcatctcgcggatgctggtggagccgatccaggagcttttcgccgttgccttcagggagacgacgcggctggtgctgaagcgcggcaaaccttccgccacagggcccacgacagtggtgcagactcactgccgagctatggaccacgaaacactgagtcgaggacaagcccagtgtggattcgcgagctggaagaagaccccgtactacgacagcggagtgcgcgcgtgggggaactccatcgctgacttcaaccaaagagtcgaggacatgctggtgcgcgagtccattctgcctcgtgtgaacgggtcgtggtagtccaagcagtcatccgcgcataataggctattatacgcggatgactgctttgaagagtccagcgaccaggtacagtcacgatgagctattattatattaatagcccatcgtgactgtacctgtcgctgagctattattatattaatagctcatcgtgactgtggattcttgtgctacggtgattactcaagttttcgttcaaaatgattgcccatgtgaggtgtaccgtagtatacgtcttcgatgtagcatattcgatacgacagggtatgtggtcctatattaaatttactgatataaatcgattagtttaatcacggctatagcaggttatagaatataaggttatcccatggtgccagtactgccatcacaaaaaagttcagtcaccgcccttgcgactggcaagacaacttaagttgcacgcagcaccaccaggaccccccgacagcatgtccgccatgctcccgagcgaggaggacgacttcctcatggacgagtcgtcggtgctggcgttcctcgccgactgcgagatgggcgacgaggccgcgccagtctccacagcctccagtaacacgtcaacccccacacaatgtgacacattaaccgccacttggtccgacaccagcagcagctccgccagctccccggagaagcccattgtgaagaagtcgtggcgtcagcgccgcaaggaggaagtcctgatgctcagggaggtcgtgaagcaactttcggccgagctcgagcgcctcaaactggccgcgggggtgcactcgacgctccccagtgcacttgagacagcagcacataagaccccagtccacgcacgcaagacggaggcgtcggtcatgtggcagcgagtggctggacgccagtcgatgctgcgacagcaaagtgaagaggagaacggcaagctacgtgaagcgttgaggctgcagctgcaacaggcgaagagtctgcagcgcgccattaagaggaagctgagggaggacctcgtgtcgtcgtcgatggatctgatcaagcagcatcgcctggatacgagaggggtaacccctccttcgaacagcaagacggtgtttgaccagctgatggcggggctagatgaggtttatgagggcgtggacgctttctttgaggaggcggggatggtggctctgccctgtcctggacggagaaacaactcgggggatgacattgctaaggggaagtttatggagttcctggatagctacgcgctgccgttcgactttcgaaagacggccaaggtgatctggaccccggagaaggaccagcccagcagcaacttgtactacttacaggtgagtttctacagtatctgcatcgtgtatttggatatgattttagcactaacaatggtttgtggttgcttgcagaattttacggcggggagcaacacccacatgacgagtttctgctttgcattttcgatgctaggagtggacttccgtgtcgttatacgccatgtgactcgaagatacgtggagaaagaccgggttgtgttcatttcgcgggcgttgatcgagccgatttacgaggcagggtcgattacactcgttgagacgagtcgcatggtcttgaaacgtggtgatttatcagctttagggcccacgacagtgatgcagactcatcgagaggccaaagcttgtggggtgatttcggggtttgatactcagaacctccctagtattcacacggttggcctcgaaaactgggaaaagaacattacgcgcttcaacaacgacgtggaggaccagctaattcggacagcgagttaagtcgtaggtagactttttgtacatcaactcgagttttgttctctggattttatccagagtccatgggtgaaggccactgaggtgccattattctcacatcaaatacctgctaaatatgggtttgagcgctgctgatgtttatagctaaaatacctgttatactggatagcctgcgatctaatcaaattatgctgctatgttgacccatccgattgagattaagtcaaattacctattattttgcatacccattaatcaagtatatatacctgtgatagatagtttatccgccactcaagcgacatccatcggattttttttcgatccaacaacatgccgacgggatcccgccccggttgctagaggggcattgcttcggaaaatgttgtatcttagcttctcagcaccgccaagtatcctatacacactcatacttttaccaaattggtttcaaaaatatgccgggtttgcatcagattttattaaaaggaccgggcttggagtttaatatggaaacggtataggcagcacggggaccgatgccacgagcaagcgcagcgagcactggtagacagcgcgcgtgttcccgacgttgcacacatgctgatcaactagaacttgcatgtccgagtcatccgtcgccgccataaatgaagacaggaaagaggcttgacgtatcagcaagggatctcgtgccgcatctggtagtgccgtcgtagctttcgacctctttcaaccgtaaatcaatgtatagtctgttgcttagtcctggtctccatgcttcagtattaaataaacacttttcgaatcattataggtggctttggcgttgccaccgttgaccgctgaatcgattgcagcaaatttccgggtggacatcgttaaatatccaccaggctaaatcgtgctcgagaattcagcaagccaatatatcagtaaaattgtaactcatggcgaaaaattcagtcacattacattcaacaaccaccggtatgcacatttgctcttacattacattaatttaaagctcattgaaacagcgagaccagcagtgcgccccccaacacgtaagtgtttttcacaataacacgaactcactgtaagtgatttaaaagagcttcaagatgaacgactacacgtctcactccccatacatgttcgccacattcactatacagtaacaaacatttaacaaacgctagtgttagctatacatttagcgtttgtgtgaacatgcaagaccaaaagttggtgtcagaattgcacattgttactttaacttgctcaggaaatagcatgcgattttggagagcaacgacgtcttacttcctgcgcaaatgacattacttcgtctatttatcaaggttgtcagaatactagggctccgcgaaggctgggataaaagatttttggtataaactttttttattatatttttcttattagctacggtcatctcctgcgcctgcttcgcagccgcagcatctgcccggaaatttgccagttctaactgtctaccggcaatgctttacaatattaaaaatgcgaaccttggttgatatctgtttagagcttgtagaaaaatcaaaatgctgaccttcagtcttaacttcatttcgttcatacgtacccagacatatactgattcatgccagtgttgtcggtagtgcaccggtgcgatctgcccacgcttttggagggcccagtgcggcaccggagacgtaccggtttcaagaaaatgtaccagttagatgtcaagaggagtcatcgtttgacttgatgtaccacggatataatcctatttggtctgcgatagcagcactaacgttgcttcctatcccagtaatataccaaatgccagggcaaaaagagaattctccacgttttcttcacagatacagagcatacatcctggctattgtcttcactttatggcacgtctggcctagtcaccgctttctgtatcatgccaatcttcgtaatcggttgcccccgctgctgcagaactgtgtgtagcaagcgatttatagatttcttcagtcaacgattgcagcaactaatatgccaactaattctagtgctgctttcttgcttccgcatgagtggttcgtaatagttagcggtagcatagtatagcttttggatttagacttcactgctccatgccagttttgccaaggatctatcagtgtactgaccgattccttgaattaggttatctatgaataacttaatccaaacgactcttcagtacattgtttcgtacgttagcgcagactttttacgaagctgcctgacctctcatatgttttttacggcgggctccactgtcatttgcctccgttacatgtaccacatttaaccggagttcagccaccccttgaaaagggttccacggtccatgtgcataaatcgtcggtcgtcaactcttaccttaaacttcaacgattattgcggctttcatccgttttggcaaatcgggtggtccaagatccgatatatcgggcccgagttgctggagggctccgatttagcaggagggactgagggaagcaaactatatctggcccgacttgcgtctgggggctgcgagttgcgaagcaggggccagaaatgccgcttttcgccggcaaaagggaccgccgcgaaaacatgtctggggccctctcagatcggcgtgacacgaggttgtaggggccgtagatgatcacacaggtgatttagctggccatagtgctacgaagtggctataacagtgtactattgtccccaatgccttggagttctaatgcgtcatgagaggtgaggaggtatgaccaacttggaatgcctcccctctgagccttatgctactaactcaggtcagatatagctaagttggactaaccgatcatctaggagctccattttatataaatcggactccgagataacacgtcaaatcgggcggcaaaatagttgaaaaccacaataacgcaatcgtttgtttgctgatacaaacggggcgatctccggttcgataaaaagttgacctcagtttaataacttgttataccttcgaacaaggtaacatttgaagggtcgcgtttgagcgccgttcaacatgagttcgtgtgttcttaaaaagaggcaaagttcgaccgaaatcgccccccggcaggctatgatagttcatttgccctaccctattctcaattgtaatacaggggttcataaattggagtaaaaagtacctgtaaaaagggtattgtgcctttctgccaaaacgccctccgatttgaggtcctacgtaggactcttgctcctacgtaagacctcataaaagttagtaccaaggccagtaaaaccgtgcataaacaataactgaatgtaaactgagcgatttgcttgcgaagggaggccaacaaattgtgcacagtaccgttatacctgtaacacatgtacacgtacgtagctccacgctggcacggtgacctggttgcggtgctgcctgagcctccgcctgtacgagtgcggccaaactatgcatttgccacagatgctttcaggcgcactggcctgatctagtcctacgaagggctcgttagtcctacgaaggcccgaatggccagcttaacatggccattcggtccttatttccaaaaaggtaccctttagatgaagacggagctcctacgtaggacttccgtaattcgatgcagggccagcagcaaatcctaggtttaaccctaccctctccttcttaagaccacctttttgaggtcagattggccaaagtttctgaaaggcacaataaaaagtctttatgcacatttcattataagggggggctatgccccaactactactattactaacgcactactactactactaccctatcacttcacgtttcaagtgcacttgacttttcgtgcgtgccgctagggaaccccatgagaattgacaacgaagtaagagaacagttgctagtgctgcagctgttgctgcatcaaacatccatgtttgtcaggaaaaacaaccaaagaagtatctgcacagtcacctacaggaacgtgtggtcaacccaccactcgttcttgtagttctctccaaagagctccgtaatgtccacatcagccttagccactttaccaaaggacacgcgcttgtccgtagccgcaccaggacctctgttgttgaactcgaggaagctgacgttagccgtgctgtttgagttgtcccaaatttgccaaccgtccgtgttgatggagtcaccgagctcgctgttctgccagacaacacgcgagtacgggtgccacggacggccgaggtcggacgagctgttgccgtacgagccgaacacgcgcgtgttgttgaagacgaagtacgacgggctggatccattgacgcggccgttagcagcgatacagcctcacccagcgtctcaaaatcgcacgactcgaaccacgcagcagccagagacccgaacacgaagtcgacggcgccgctgatgtacgagcgggcaaacacctccctgcccttattagcgtaaaccgtgtcttgatatccagagatattacacgcgtagaagccgtagttgtcgccttcgatgtccacagccaccgcctgaccatcctgcaggaacttgccggccgtgttagcgacgttgagattgtacgtcctcacgttgttggacttgagcaggagcgtgctggtgaggctgttgcgtccgttcttaatctcgggaagaatgtccttctgcgccttcgcttgggtgatggtgacttcattgtcagcgtacgacttggtgttgcacgtgtagccctgctacatttgccacagcctctgaaacattgcggaagctgccgctgtaggctcccgtggggtcgacaacaatggagccaacagggggctgagtacgagcgtcaggtccggcgcaggtgtagccggcagaagcggtcgctatgagagtagtgaggaccacaagtggcaaggcaaaaatgcgcatggttggtgacagtgtgggctggttggatatggcaaaccgtacggaacatcttgagatgggcttgcgcgtacaaattctggtgtgcattagcggggatgacgccaatagtacatgaaggccagagatccgggattacaattgtagctccaaataagaaagaagtcaagataagtattggtgatataaattattaacacagaaagctcgttcttctcattatctcgcgctgtcacgtggcacacggcaccaagtgttaattgttccccaaggatacgagtttctttaaagccttaccatttagcatctgcaacttaacatttcttgtacagcagcaaccttatccagttcaaacatcccgcacttccgtttggcactgatgtccgtaaaagttgaagctgtcgccgcggatacagggttgacacgtcctgaaaagcagccgacaccacagcattgttgcagtgttgagaatggccttatgcacgttgaccatcaactagacgagccttgaaacgaaaaccatgcgattctgtgagcttcattgtaaggttttgacgacctgcccaggcaagcgccttctcaatagcacgatgcgcgacgaccaccggagcaaacgtgctcaacttttcagataacacttatcataactactcgcagatgtggaccgcaactggtactgtgagtttgcagcgaccatcattgccacggacaagttcccatatgattttaatattttacaagcattaatatcagtagtacatagtagtaatatctacaccaaatagtagtgctttaacataatagtagtatctggtgaagagtgaaacaatattactacaacaaagtactgcgttaaacactagtattcagattttttttaagcattgcggcttgcagggattttgccctctcattttcaactttatatcggaccctgatttatataaattggagctgtaggggtctgaaatagggatcgaacattcaaagcaggtgatatacatagtgaagtcaaatatagcatgctctacactgttcaatgtccatctactctaactagtaggtgcagagatagcttaggtgacagcgcagcgagcgggttgtttacttgttcgttctgctttcttagctgaaagaatcgacgcggtgtatgttgccatggcactactcttccgtaaaaggcacgctgccgtgcatgcacccccgattgtagtggatttgccacagctgacctgagataatcactgcccctcagaattgcaacattaaagcggcaattcgggtacagtagctgctaacaaatcggatcccatcaaatcggaccactttaacaaatcggacccgatatatcggataaatgatgccctgatttgccaaaatcgctgcaagccacaataaaatagaagcacccattcaatatatgtttggcaacacaaaaacatctattgatttccaccacgctatcagtaaatgcatggagcaatgcgtttacctcgcattgctcttacaagaacgcgttgtcaacccaccactcgctcgtgtagttctcacccaagatcttcgtagcaggcaccgcagcatccaattgtgcactgaaggacactcgcttgtctttcgccgcaccgggacctctgttgttgaactcccggtaataaacattggcgatgttcgtatcgttgtgccaaagttgccagccttccgcgttgactacatcgccaagctcactattctgccagacaacccgcgagtacggacgccatggacggccgaggaaagccgatccattgccactggagctgaacacgcgcgcgttgttgaacacgaagtaggacgggctggattcattgacacgaccgtttgccgtgatgctgccaggcccgatagtatcgatgtcacacgactcaaaccacgcctcccccctcaaaccgaagacgaaatcaatagcgccgctgatgtacgaatgagcgaagagctggcgtcccatattcgcgtaaacggtgtcctggtaagaagtgaagttgcacgcgtagaagccgtagttgttgccttcgacgatagtagcgaccgcttgcccgttcttctggatatacccagccgtgttggcgagattgaggttgtacactttcatattgttcgtcttgaggcgcaacgtgctggtcaggtcgttgcgtccgcttgtaatctcgggagggatgtcacgctgggccttcgagtgagtaatagtcacctcattggcagcatacgacttggtgttgcacgtgtagccctgcatcaccagagggccgttcaacttggagaccaggacttgctcgcggtacacaccggggaacaggaagatggtgtgctcgtcggtattgttggggacgtgcgcaacagcctccgagatgttgcggaagctgccgctgtacgctccagtatggtcgacaacaaaggcccctacaggaggctgagtgcgagcgtcgggcccggagcaggtgtaatcggcagctgcactcgccacgaagctgacaaggagtaaatcgaaaattcgcatcgttggtaagttgagtacagtgggtcggtgggtggaggaaaacctgaagtgagatgtttggagttcgagcacgagctcttggtgtgggctgtcgtgcccattgcaccatgcccactggcagcaacgctgcgacagcgtttacttgcgtgctgtacgctgtgatgaagaagaccccacattttggtgccaaaactggatgtatcccttttaagattggacaatcgatgattgcgcgacttcggcaggaatgtgtattgttattacacattcctctcgaagtcgcccgatgcattatattatagtgcgtgtatggtctcctatgctgtaagccttttcgcttggttcaatccaagaacaatatcaaccgtggggttcttttttaccaatccgaatatcattttttgcctcgtactgtacagcaaaccagtttcaaggtttgcacgcagaaaccaatttgatgacaagtgcatgccatttggtagcagaaatgccgctgaacccgtgttttaatagtatatccacacaccaccatccgtgtaaccagcatccagagcgaatctatggacaagacttgacagtagaagccgaatttcgtggctcaatggtctcgtactgcacaccgagcttaaaggagttatgttggaacatcgttgacaatctgaggaagtcgactcgataatcgctgacgaggggccaccgagcgaggaagtcgaaccgatgcagatccaaccagcgacagagccgtcaacagcggctgagctgcaggaagaggaagatattcggatcagccagtgaattaagctcaaatagaagaccactttaccacgattacgctgcgttcatcggtacgaaagaaaaaactcaacgaagcgcatcccagcctgaaaacgatcccgtttgctatggcgttgactaaggctagtgttttacttagaaaaaaaaagatattcagattcacgagctctcagtctgtagttacttagaaaaaaaagatattcagattcacgagctctcagtctgtagtaactgtagtaacagacttgagagctcgtgaatctgaatatctttttttttctaagtaaaactgtacttcgaggtagaatataagaatatatcgaacgattaaagagctattcacaggtcgaagacctgtgcttggccggcagaaatattttgtaacttaccgaaaccgggtacctttctaaccgaaatagagtactttataatctaaacaattacatttaaagctacgaatgactacatgtattactctgtagctcaggggttgtttgcttaaccctttcgcggtaaaaggatacagaaagcgccctttagatgattttccaaaacacggtagagtgtacaccctcttaaagggcgcatcctgtgcccttttgcacaagttcaagctagtaatcaaccttcttttaaaacaaatcataatcagtacgcagagtaatcatcatgtaatcattgtctatacaaatgctaatcatacgcatacactctatgcattctgcaaatcaccgtagatggcatgtcccatgatacacaccgaaaaggctccgtaactttgtaaaaggacgcctagagcgcccttttagaaggaagtatcaatgagttgtatactataatttattgaggatactcgcgaaagggttaatttagcactaaaatctaagataagactaaaaattacgagttattactacttttgtgaaagattgctaagaatttcacaaataaactacgctatgcatccgctgaagcatactttatagctgggcaaggcttgtcaatatctcgtgctatcatgtctgctagctcgagctacgtaagctgtacgcctcaaatgttgatagcttagtacatcgtctcacattagacatgctcgccaaacatggaacggagggtgataatattgtcttcactgcagatttggatacctgcatgttattataggtgacattctggcccataacgagctctggttcgaatgtagacgaagcgatgagttgcataaattaaaataaaaagagagagagagagcgatctatctacctgttggatgagcaaatgccgctcatttcgcgaaactctgacgattgactactaaggcttcgcgggtgctggaatagctcgtccagacttgtctaatccgcattgcaagtgacttcggtgcgccgcacatgctgcgcaccaggcactctctggatactttccccactcaatacgatagtggcatcaaaattcatatcagcagggttctgcagtagctttaactctgtctctttctgtgtatatctagctagcctagctcaatagtttgtgagtggattccaagtttttgctccgacccagagcatttaatggccactttgttaagtttccaggccaaaatgagacactggtcgtcctcagaatcttcttgacgtagttcaagaactcgacttagccgactgtcagcaaacggtttatttagcaactattcattcttgccaacaacggatcttgctactgtaatgttcatcaattgatttctgaagccttattaacacagaaatggctccaagtcgggctcgcatacaaaactaacttgcgatttgaacatgtttcgctgagatcgagccattattgctggtaaataccagtttcagagatcaacttttgactaattcgacctgtgccccccccccccccccccggagcgttcgctccgggtcgcctatttacaggtcgaagacctgtgcttggccccggcaaaaacttcaaaaaccgggtacccaatggggtctctctttcttaattgtaatgttaaagctaatatctgccggaatcgggtacccgtcgataaatgctatcgccaaaccaaccagctaactcgacggtgacacgagcatcgttcgtttgaataagactttttccctgcgttgaagcaaccacttccaaggaattggcccattagcgtatttctcatcccacaatttaccccccaagccctcaagttaaaagtttgtttgtttgttttgtttttgaattgaggatcactattgtcacttaactaacatcctcagttaaaaggtcaagatcagcgcaccatgcgtctctccttcgttccgctactgtagctctctcgtctgattgttagcacacaacatagtacaaaaatgagcacagtataccttacctgcaaaatgaatgaaatagctatctcgttgctggcgccaacgcagccattggacgctgaccagggtgttatgtcactgatggcctcatcagaccaggcaacctcaattggggactttcggttcctgagaaccgaccacgataaagaagagcggggcttgctggttaccagcctcacaaaaaaggtttggctgaaacatcatttccgtaccgatacacttcgatgtgcgcaactatttgttcaattacgcattcccgggcagtagatgcccacgttagaatcaactacagggttgggctggtagtgcttttaagtattaaaaacgatgggatttactcaattattatctgttatcatcgtccatgaaactatccgtcgacctgtgtaccctcccggagcaacgctccgggttgcctatagacgataactgtaagttcgtgtaattgcactcacagcgaagagagccgcgagataaacaatggagatttgttaaccgtactatcatagttcttttactaacgtttgctgaagtaataaagaacgttatctttcgactggtgctatactttattgcccggaaacgtaacacttggaagtatttcctttctggacaataaatttaaaattatacgaacaggaagcgataagagtatcattcgacaactgtggaggctccaagttgtgagaggatcgcctcttcggacgcccaagttgggagggataaaaagcaaatgtagcaccttcaagtcactggtagggcgactggtgctccgctgtgtggcgaataaagtcacttgtcgctcgataaactcgcgcgaatgcgctgcttgttatcgtctcttgaaagttcggcagctttgaggtactcactcggtttggcccttcacatgtctacaagtgtttttcgtactactagtagttaccagcattgttcgcagttcgaagaactgtcgattgggggaaggtttttggatgtcatcgaacgacattcaagctactcctgtagcttgcggatgtcatcgaacaacattcacactacatcagacaacactcgatcgattccggtctgaatgactcttacaggtttagatggatgcctattcgcctcggagcttcttttccttctagattgatgtcagatgcacacgatgccaccagggaaagtggagctccatcacaaacatcagagacagagactactacgacgaacaccgtatgatgccgaccttgggtacaactggtcattactacatcactgcatcgtattatactacatgcagcttcaaagcactcaacatgcagcttcaaagcactcactgactcattccattagcaattatcgattcgatctgttatgagtcataacttataccctcctctttcagacacaaattttcttctgcgtgtatagattttcagagagattaattgaaaatcgtgtggtcacctgagtttgccgtgacataaattgtcgtcaggctgatattgtgtgaatccccacagtcattggaatgagtctagattaattatataaaacattccactaaaactttgcaaaaaagctacttaaagtttttaaggttgtgcgaaccaagatgggaagtatagcttgattttttttcggtcaacatatttttaaccaaagcaatctctatccgccgacaacgcggtggcgtcctatacgatggcgaacgaattcatttatcggagactcaaaaagagctgcacctggttctccggataaaaggctaatgatctacttctttatcctgttctcgtcaatagaacttcaaagtacattgttgcagatattaactcagatcctcctaatgctacatgaatgcggtacgttcagtttaatacttgataaatggcaataacaaacttggacgaatcgaagctgacagtttttgttgttgttagatattcaggcgacccggacaaaaatatgtgtgcagctgcgccatgttttatcaaacataatttaaaatgcaccttgtacgcccccggattcttctgcaagaggaagcccgggcggacaacgtaaaagcaaaggacaaacacccggtgtatccaactcctacacccgatagagatctccaagacctcagttttgacccatcaaacttgctggcttcatcgggctaccctgcaacttcggttgagcagttagcctggcagcgctaaatattcgaatgcacggttttttcttgttttatcgccacctgtaagtccgagcacaacactgcaatcgaagcaatacaggattctgcctgggcatcagcgcacatttcagtgacaggaaggaaggaaattacgttgattagccagttgttgataatcgttctactaaccacaaaagaactaaagttaaaactaaatccgtggggtcctcatccgacgggcaggaggacgtggagtcaccacggtgggtttgtcaaactcaagcgttgaagtgtcaattcgttatatgaactggcaacgcctttgaaaagtagtgatcaaacttggtacacttggttgtacagtggtagattaggcagatgctgcggatgcgaagcaggcgcaggaaatgcccgagtacatcgtttgcctgcaagggtatccgtacaagccaacttcgaactgcgataccccccgggtccccaattttcttagctactgcaaggaagttgagtctaggtctttacattcctacggcaaaaccaaagccgcattaaaacatctatgtttatcaaacaactaactatcaaaatgaatgaagaaagtgggttttcctacctaagtctaccgcgcgtgatgcttgcaaggcctgacgcttacaagaacttgtggtcaacgtaccactcgctcgtgtagttgtcgccaagaatttgcgtgatcggcaccggcgcatccagaactccgctgaaggacacgcgcttgtccgtcgccacgccagggcccctgttgttgaactccttgtagtacgttggccgtttttttgtccttgttccactgctgccagccgtccgggtggatcacgtcactgagctcgctgttctgccacacaacgcgcgagtacggacgccacgggcggccaaggtacgcggtgccattgccgatggagctgaagacgcgcgcgttgttgaacacgtagaaggacgggctggactcgttaacacgacggttagccgtgatgcagcccggaccgacaggctcgatgtcgcacgactcgaaccacgcctccgccttggtgccgaagatgaagtcgacgtcaccgctaatgtacgagcgggcgaagagctccttgcccttgttagcatagaccgtatcctggttcgaggtaaagttgcaggcgtagaagccgtagttgttgccttcgacgatagttacaccttgacgttgttggtcttcagacgcagcgtactggtcaggtcgttgcgaccgctagtaatctcgggaggaatgtcacgctgagccttggcgtgagtaatagtcacctcgttggcggcgtacgacgtcgtgttgcacgtgtagccctgcagcaccagggggccgttcaacttggagatgaggacttgctcgcggtacacaccggggaagaggaagatggtgtgctcgtcggtattgttgggcacgttgcccacagcttccgagacattgcggaagctgccgctgtacgcccccgtggggtcgccgacgatggcattggcaggcggctgagtgcgagcgtcggggccgttgcaggagcattcggtggagctgctgaccaagaggctggcgagcgcgacgagagggagggcgaaaatgcgcatagttgatggaggggatccgctaaggagggccctcatcgggagggccctcgtaatagagtcgacatttgggaaacagccggttgtgacaaacgcacatttgggtcattcgtaataggtgcatgtaccgaaatcgtcggcaacgctctgtggaaatgataccgttgccgacgatcatagctctactataaataagcatccgaggcgaagtttactttagactaccagcaaataataagagggattgagtgcttgccatttttcagatctcgttgtgctgatggtgcgccctgctttcccagcgtctggctacgccgtgttctacctgcaagtttcccaagcgactattgatgagctctacctagaagcagagtctcggacctaccgacctgtgtttcgagaagtaggcggagccgaagatgacatattcagaagtcaatcacgagttcagcgcatgacacttccccttcgacgtgtttccgctgcaatccttgaggatgcagctacccgcgactccaactacagaccctgtgtgttttcgtacatgcactcgcgacctgggggacaataccaggaacctcatcaagactatgcagacgaagtgcgagctgctgtgcatgcccgctacccgggcagcattccggctagtgttattattgccatccaacccgggacaagactgcggttgtttccccgctgctttgactttgcccgccctgaaatggagattgaattggagatccctactggatatgcagttgtgtttcgtggcgatttatttcatagtggtgtggggtatactacttccaactataggcttcactgctacttgttttttcgagaccttggttggagaccagacgtggtgtcaaattcgctgttagtatgccaatactgcggtcgcaccgaacgagtttcggcccgaattcggcagcaccggtatttctgcctgcagaagccggatggactcgcgcatcgtatcgctcggcgggagcagcaaaatcgccgcggtgagtatccctgcaactattgcagccaagtttttgaggtgcaaagcacgcttcgttctcatattttggctcaagacggttcgacctctagccataatgtttaagctcaaatacatgttcacttaggtaaatttactttgtttttggcatgcgagtgcgaatgcgttttgcttacaaaaatactacggcttagcagaatattttataagacaaagcgtactatcttggttacgatatgtacactttaattaatttgaaacctataattgttttaaaacacgcagagactactgccacgttctgatgtatacctctatcacttgtgctggaaccactgctagattcttcgcctcggtcgttttacgaggtaattacctggccgttacatgctataaacatagttgtacccgataagacactagagctggcagtgcttcttcgtcttagcacccccagcatcctttcacccgcgttgtcggcaggcactactctaagaacaccaacatctactccgaaacgtgcattactaccacatccagcatccgacgtggtgtcggcagaccaacacactacgaacaacaacacctatccagacgcgagtttcgatgccttaccgccactctgatgctcgctacgaggcagcttttgtcggctgcgcagcaagtgagttctcagctagtgtctcggctggagtttcgaccggtgtctcggttgatgtcagtgacctgggttttagcgttctgggtaatttcgacgttgatagcgatggagtagccgctagcgtgaacgctgaggcgtaccatgggaattctgacgacgacggagattgggaaagtgatggcgaagacgaagactctatcatggacttgatacgagaagacttcaacatctccagcgacgtccacgaattcgactttcctgacttcaatttggacgatgatctacctgtctgtgatgaaatagattcggagttggactgggttgacgacaaattgctggctttggtttgtactcatcagcttaaggaggaggaaaagcgtctcgacaactcagcggtggtcgctgcagacaacgtagcgcaaacggagcccggtgagatcggaatgagtgggaccgacctccgtatggtggacgaaatctacattcttccgccaccacctcagcttacgtacgaatcgtacgatgcagctgaggcagcgatacatcagtggacattggagcaccattacaacgtctctcgacgacgggttcggtatttacctggtaccaaaattgtgtgggcgcgcaaccatgagtgcgatcgagcagggtggccaaagtgcacgcagcatttggtggatagcgagcgacagcggtccatgcgtggctcgaagcgttgtggatgccccatgcggttaaaaatgtgcgcggtctctaagtctgacatcgagggaccttggaaaattgtacacactcgtgataacagtgaggtacacaatcaccctgcggtagacgatgttcgtgtccacgccgcacaccggcagcgtgctgcagcaggtctatcgcttactcaacagagcatggaggaaactattgtcggtcagacagctgccggtattccagtggccaagattcgagcggccatcctccacagcacccctggttctcttgtgctcccgaaagatattggaaacctcaaaatgagggcgaggaagcaggccatggcgacgcagaccccgcttgaagctctttttactctgttgaacaatcacaattttttcttcagatatgagatcaacccagccacaaccgagcttctgtatttgctgtgggcgcatcctgctacacttcgcctgtacaagttacactgtgatgttctgataatggatggtacgttcaagacaaacaagtacgacctgccactagtgaacgtcatcgcaatgactggaatgaatattgttctgcccgtggcgcagtgtttcttacctggacaaaaagacaatgactacacttggtttttgatgcgatttcgcgaattgattgacgagcatgttatccaacttccatcggtcaatctaaccgatcgtgaattggccgtgatgaatgctcttgactctgtgtttcctgaggttccgtcactagtctgcagatggcatctgaagcagaacgtattggcaaaggttcgcagtgttctcggccaggttcaagtggagaacccccttcctggccaagataagtgggaaaatacttggcagaccgaggccttcatgtcattcttctatagggcagtggaagcaagcactgaaagtgactttgaattgcaatgtgtgattttgaaagacttgtctccggttctggcggcctacttggaggctcattggtggaagtacaagactaaaatcgtccggtgttggacgaacaagtacaagcactttgagtatcgtgatacctcagccgtggagggtacccatgcccaatgcaagcgttggctacaggacagcaatggtgacctgtacaccgtatttactcggttactaccatggtggctctcttcagcaagtgctgtaagcattcgtgctgctcgtgctgctacgattctaccgtacctctttcagaacgacagatacactcaagtaggccggattatcacggtatgggctctgcgagcaactgacgaactctggaaggaggctaatcaaatgctgactggagctaaaccgtgccgtggatgcactggtgtatttcggatcgtgaatgggaggccctgtgtacatgaattgatttcgatcattcagtcaaacggtaggatgaaactacttcctacgatgtatgatccacactggtggatctactgcgaccgaatggaggcttggcgtccacgcatcatcgaacccgcaagtcttcgcactaaacgcaggaaagcccaatcgcatcgtgccaaccatggggcaagtggtacagcacgagatcccacgcttgcagaaagagttgaccaaaacaatccagaaccagcaccaagttttctgcgagggatgacgagccatctcattaccagttcaagccgaccaagccttcatctccacgcaatcacgaatggcgggatattcccaagtaatgggcttgttcatgtcaccactgcctaccaacaagacggcttcagagtcgacccaagcctggccgggacctaccaaacgtctcacgcacatccacgcacttggggatacgctaacagacacccgttttaactttaacacgtattctatcaagtctacctaacgtgtacaagcacacccacaacgtttagggcagtatgtactacaatcgaagttgtaccactgtaccatacagaagtttcacagatatgcaatttgcagatttgcaccataccttgtactttaaacttttataagggttcgagtgcgcaagcatgtaagcgccaacgcataagtacctttctcgtatgtttcacttttaaacatgcaggtagatgtcgtttatattttagatgcagaagtgttacacttgcgcgtgttgcaaaagtgttacacttgcgcgtgttgcaaaagtgttacacttgcgcgtgttgcaaaagtgtaacagaaatgcaccttgcggaagtgttacacttctgcaatgtacaaatatgtaccacttcggtatgatgcacttatgctacacttctgcaatttatgcctttgtaacactgctgatgcattacgtattagtaaaattaataaataagcctatcaaaacatcagaagtgtagcatggtttccgtgttaactttctcactacaggttacgtgtaagttaacctagctgacggacttcatccgaagtaatagtgtgcggatgacattttgcgtacacaagccctcggctttttcttgactgaagccacgctatttccttcgacccgacggataccagtcgcatgagcagtagaggccacgttcgcttttttgagcttgggccgctgcgaggaagttgagggcgaggcgatgagttcacatgcgccgaagatggcgtagtattagcggtcttgtcgctcatgacggccatcgagagggcgggatcagctatcgctccgtcagaatttgggaccgggaccggcaggtctggctcagatgcagaatgcagcgaggaggcagcttctttatccagctcaggctctgctcccaaatcaccagtacaggaagaatccgatccatttaccggcacagcgttgccacccgagtacagctggctctgccaagcgagggatccccaatacctagcatatcggggattgaacggcacttggttgtccacagcctccttaaatcttgggttgacgccgctgttgtcggttgtaaagtcgcgccacgttgcgacggcctctcgagccgagtctcgtgtcatttcatgagcttccatcgcttcagagtcactatgcaacaaattatacgatctcgtggcagatacatgagccgccgtatcccacatcaacacgagtaatttgtctcgtgctcctgccgagaagctgccagccacttgcgcccccaagcactcaataaccgcggcagcagactcagcaacaccatcggcatcacgcttccgaacagccatcgccatagcagccagctctgccgacatcgcggctcgcgccacagagccacagagctgattgcgctgtcgtagaagcttggccagagcctggtcggccgccgactcgggcgcttgaactggggcgtcgcaggttctaccaacgcgcgagtcagtcgaagtgatagcagcgcgggctcgatgtgggtaacgagcgccatcttggcgctcgtctagcaccccgttgggcgcttcttccagaaggaacgtgtcgtcagcagtgctctgcaagaagctctctctctcttctggcattagcgctttccacttcgcgcgcaggtccttgccggcgcgattgctgagccatgccttggtgactgcagcctcatgcgcgccgtcgagctcttcttgagcgaaaaccttcgcgtgggcagacactccctgcccttgctttagctgggatgcccaggcgaagaaggcgcggtggacacgcacgagaggtgggagagtgctttaagaaccgagctctcgttttggtacatgtacctattacggatgacccaaatgtgcgtttgtcacaatcagctgtttcccaaatgtcgactatattacgagggccctcccgatgagggtcctccttagcggatcccttgatggagttggaagttgacttggtcgccgaggaggaaaagtgaaactgagatgtttagcaacccttccgtaagacggacagaccagtttagggcgtggatcggcatggccttcggtgttcgttgttatgattgggcctatcctatctgtgggctgccacgatccgctgcgacagtgttacttgctcaatgaaaactctccgaatttcgagatggcaaactggatggattttttggaggggattgcgtgaatcgctttgctttttgtgtgcgcgcttcctcgaggaccttgccgctcaattcttgccgcacccgccaccgataaggaagatagagtagccaagctgcgtaaatgcacaaatacacaacgtttccttttgctcactctgtcttcgcgctcttgcgcttgaccctgccgaattgagtctgagctcctacttgttcaatgcactgtggctgcagtactctgccaaccactcgaactacttcaacacctgtctgctgctccgcagcttctcctcacttgtctccacgacctctctccttccgacgacttcgccagcaccttcgctccatgagacgaccaccgccgttgcgccatagaaaacaagaaaacggggctcgactcaacgacgtcttgataggagcaaaagagtgacttacgctatggaccacgcttaactccagtcgcccctcttgttaggacaaacgggaggacaaaatcggtttttacttgatttctgtatagtgtaccacaaattttgtcctagacagacgctaggacaaaaattatggtacactatactttacttccgtgaatttcggatttgtcctagcattttttcggtttgtcctagcaaagtgcccgactggggttaagaaagctgcatgtgcaaccagaggtttttcttcttcttcttcttcatcacgaggggacgtaggtggcaatgacgtgaggaaccggcctggagagtgtttttttcggcaaactttcgcgaatacatatcacactggaataatcacttgggttatgctacttgcatcaactatttcagagtaaacacatcggttttgaatagataaaacgcatttgctataatgcatgttatggctagcgaagttgagtaagcagttagattaggccacgccaatgttgagctctttcactagatcgtggcaattgaacccctttcgcgtctccgtctcaacctcattcctcaatttgctccattctccactcaacaacaacaacaaaaacttcactcgcaacttccgtctccctgtttcagttcaccgatgactccgacgaactacatcgcagcgaactcaccgaagggtccggggggggggggcgcatgggagatggtgggatttgtctcgcgaccactttgaccacatttgaccacattcgaccacatttgaccacaatgttgtctcgatggtatgtctcgatcctggtggaaaaacagatgtgctatgaaagttagattttattgctatacgctaaagaactctgttatcgtacgagtagtattcttcttcgctagcaaacacgcaggattttgagacccttcaccgcactttaagtgcttctggcggcagctcgaacacgaagtcgccttgctagctggagcgagaggtggagcaatgctgtcagatatctcgttgccgctactcgctggcttgggacaatttttttctgctgttcgacgtcgtttaaggcggcagcgtagttgattatccgtgaggttcgcgtcagggtaatatttcttcagctcctgctgcagcaatatatattttccacgagtatacaccagcgaatcagacagtttacgcaactcagccaagtgctctggtgcgatagtagatggccgaggccgttttgctggaacacttgattgtcctgcatcttcaccaatcccaacagtgtcacgacaaataacctgcggttgtagtcttgctggaggtgtgtcgtctgcatttgcactagttgcagctttaaccgcttgcagaacttgacagagtgatccattctcatgaccctctttacaacacagtctttcatcactttttcacacagcgacccgtacagctctgtagcgtgtagccatgccgtcgtaagcgtgtgattgtcaacaactctgttttgatctgcatactgatcctctgatattggagtgggggccagataggtgaagcaacgctcgtggtttcgcttgataccactggaaaacagacccaaaagcttgtagtagcgctgtttgcgcctacgctccatattggccatggtacgttgcaacccattctgcgcggtaatatcgtcatgaaccatctccatgagtgagttcgagaacactagcttttggctcagaacaaatggaaagtgaaaaatcatatcgggccattgtgcaaagtaatccgagctcacagtgaaaaaatatgatcctgttacagcgcacctatacttcacaaataccaggtcgcacttgcactccacagattccaccacacgacggcaatagtctttcaccttcggattgcagttgcagtctcggctgatgcacgacggcagacctttgcctcctcgatactccggggtccacacgaacaagggacgtgaaaacagccgcgacaactgcatgtcatccaccttttcctcaggataaactagacggggagggaatgagcgccgtccaaccgcctcgaccactgctgccttgttatcattgcgcgctgctgacaaggccatgcttactgcgaactcctcagctacaagttctcggtagataaagggaaaacggctgcgcccctccggggctgcggccggagttcggagatctcacctaatttatcggagttcgggggcctgtcggcccccgaatctcccatagaccaagggtccgaggggcgagaaggagcgactccgtgacggcagcgaagtcaccacccttgaagaccggcccaccgatgtcaaggaagatgcgaagctcgtgtccatgggcgagttgttgtcgttcgctgacgacaaggaccgcatgctcatgatcgccggtacactgggcgccgcagcggcagggatggctcaaccgctgcatatcgttctcatcggagacgtgttgaacggcatgaacccgtcggactcttcttccagtatcaccggcaaggtggacgacgctgtgctcaactacgtctacgtcgcggtcgtcgctatggtcgctgggttcctccaagtggtccacgacagcgtcgcgccaagtgaagcgaatccgcggcgcctacatgagctcgattctggcgaaggagatcggctggttcgacgtgaacgagcccatgcagttgtccacgcggattgtggaggcggcagtgaagcttgaagaaggcatgggccgcaagatcagcgatgggattcgcaacctgtccatggcggtgactggagtcgtcatcgggttcatcaaaggctgggacttggcgctcattctgctggccctgatgccgttcctgtccatgaaggtgctgaccaaggacacgcagaccgggatcgaggcctacggccaggccggcgcgatcgctcaagaatcgctgagtaatgtgcggacggtccacacgttcaacgcctgcagacacttcatcgacaagtacgcgagcgccttggacgtggcaacccgagcggggatcagcaaagggttggcagttggatagggcaccggactcatgttcttcactatgctctgcacgtatgcggttggcatgttctacggcgcgtacaaggtcgccaacgaccagcttgatggtgacaagtgcgttggctccgggtgttacgacggaggacgcgttgttgtggtatttgcagcagtcttgacggggtccatggcaatcgggcaagcggcgccgagtatcgaggctctcgtagctgctcgagctgctgcgtacaacatcttcgagacaattcgtcgagggtctctgatcgatccgctgagtaccgagggcaagacgctggagaacgtatcgggtgagatcgagatcaaggacgtgacgttcgcgtatccctctcgtccggacgttcaagtgtgcagcaattattcgctaacgatcggagcgggggagaccgtggcgcttgtaggacccagtggaagcgggaagagcaccattgtcgctctgctggagcgcttttatgatcccttgagcggcgtagtgagcgtcgatggggaggatgttcgtggattgaacgtcaattggctccgtccgcagattgggctcgttggtcaagaaccagtgctgtttccgacgacgagtatggagaatatccgctatggagcgccgtcagcatcggatgaccaggtcgttcacgccgccaagatgtcgaacgcgctggagttcattcaggcgcttcctcggggctttgataccgaagtgggggagcgcgggacgcggttgtcgggtgggcagaagcaacgtatcgccttcgcccgagccatcgtgaaaaacccgctgctggatgaagcgacaagcgcattggacacggagagcgagtacgtcgttcaacagtctctggatcagctcctggcttcgtccaagcgcaccacaatcgtcatcgcgcatcgactttcaaccatccgaaacgcggaccgtattgcggtacacaacaacggatcaatcgtcgagatcgggacgcacgacgagctcatggagatacccaacggacactatcgccatttggtcgagtctcagagctcaccggctcatgctgacagcgatgtagttgcctcgagagcgccaagagagctcgacatgcccaattcggtccagaccagcgctgccacggagtcttcaaacgacaaggtcgagtgtgtgggggctcctgatcaatctgccacggtgctgtctcgggtgaggaagatggcttcaccggaatgggccttcttggtagctggaggtgtgggtgccgtgctcaactccgcagtattcccggcatggggtgtcatgatggccaagatcacggtgctcttcttcgactatgacaagacggagcatgaaatggtccacgatgcgcggtactggtcgctgagcttcgtcgctctggggttcgtctatggtatctcaaaattgctacagcactactgcttcgccgtagcttccgagagattggtagctcgcgttcgcctcgctgcattcaccgcaatgttgcgtcaggatatcgggtggttcgacaagtcggagaatgcctcgggagctcttctctctcggttgtccaccgacgcagcgacgctacaggctatgacgtccgagtcgcttaatcggttggtcgtgaacgtgacgacgctgggcatcgtcttcgctgtctgcttcttcttcagctggcagatgacgctcgtcttcctggccgtggctccagtgcttacgatctcctcctttatggtcaacaagtccgtggccgacggggactcgacgtccaagaaaaataacgacgcggatgcagaggccggtgcgctgttcaccaacgcagtcgactcgattcgtacaccgtggcgtctctcagcatggagaagaacttgaacgccaagtacaagcagctgctcgatacttcaaaggagacggatctgcgcgctggcctcgttgctggggctgcgttcggcttctctctcggttccatgctgctcgtcgccgctctgctgttctacgtcagttctcggtggattccgcgcggcaccatcacgttcgaagacatgctcatggtcttctcgctcagctccttctccatcggctctgcagcgcagggagcgacagacccgacgaaagcccagcaatcagcagagaacatcttccaagtcatcgatcgagtaccggccatcgacgtcatgtcttcttctggtcgcacctttttatccgtgaacggggagctggaattccacgacgtgcacttcgcgtacccgtcccgaccggaagcgaagatttacgttggacggcgtggatttgcgtcaactgagccttccgtggcttcgcgaccgcatctcgctcgtgagtcaagagcctgtactcttcgccggagccattgctgagaatatcgcgcttggtagacccactgcgagtcgcgaggagatcgttcaagccgctgcagactcaagcgcgctcgagttcgtccgcaacctcccggacggcttcgacacggacgttggcgatcgaggaggtcaactctcaggcggccagaagcagcggattgcattggcgcgagcgattctgcgggacccgagtatcctcctgctggacgaagccacgagcgctctggacaacgaaagcgaacgaatcgtgcagacgtcgctcaacaagttgctcaagaccaagcgctgcaccaccatcatcgtggcgcatcggctctccacgattcgcaacgccaacttgatcgcagtgacggaacaggttgtcattgtcgagatcggcacgcatggtgaactcatgcagcttccaggaggaagatacaagcagctacttgcccgacaaacgtactgatgtgtcgtcttcattatggctacactgcatttaacagttattaatacccgttaatcactctccaccaatcaaatcattttacttatcccctggccaatcaaaagtcccctatcattaatcgcaccttgtgcctttcaaagcccaaaaagtatgcctcgccgcacccatttgtccgtggcgcagaaggccgagctgcgtctgtactaccgcgcgcacccggacctgacccatgaagacataatccgctgggcgcagttgcgcttctccgtgctgctcggccgctccaccgtcggctccatcttgcgggcgccgcaggactcgagcctcaatccggacgccaagcgcaaccaagaagggcgcttccccgaaatggagcgggaactgtaccaatttgtgctcaattcgcccgatttgggcgatctgagcgatttggtcctgtgcacaaaagccaacgagttgctccaggggcaacagtccgtgaccaaatcgtgggtcttccgcttcaagcagcgccacgcttttggtgcgctcaaaaatctgcgcagactgatcgacgactataatcctagagacgtgttcaatttggacgagaccggactattttaccagatgccgccgcggaaacttcaaggtggcaagaccaaaagaccaaaacatttgacagtcggcctgtgctgcaacatggacggcagcgagaagctggagcccgtcgtgatccacagcgagcaaaatgggctcgacgggacccaaattccagtgcgacattatgccaatgctcaagcctggatgacgggggacaactttaccgactggctgcaagctttcaacgcgctgatgaaagatcgccatgtgctgctgttggtggacaacgcgccgtgtcatggcacgacggagtttgagctgtcgaatgttcgggtgtatttcctaccgcccaacactccgtcccacctccagccgatgcgagcggggatcatccagcagttcaaaattcacgttaaggcgcttggtgtgcagcggattctggaccaccaacgttctactaggaatttgggcaatggcgaagcaaaaatgggtcttcttactgcggtgaagcacattgtgcagtcctggcagcacatgcctcctccttttattaggaactgctgggcccataccggtatcgtttcgggagatacagtgctgttgatacaacagcaaaatgtgccaaagatcccagttgacacgtcgattttggacagaatcatcgcgatggttgaaccgaatgaaccgatgaccggactggagtatattaacgccgaggagaatgtaccggaatggatgcccttctctgaagaattaccgccagctccgcggtctcgacgtgcgacccacacactgcaggagcatgatgaatcggaggagaagaacgacgagcaaagtgaagtgaagtcgctcagtcatggagatgcacttgcagctgccattcagctctcagcctatgcatttgccaatggcatcgacgctcccgatcttcaacgagtcatagagtttgcccggatgcgctgtcgtggagatccaagcacgtagatcgcaatgccgtcggtgactgaaatcatagcgtgctgtttacaagagaacgcaatggttagggagaagaactacgacgtggaagaaatgagtgtgtggttcctgttgaacgatgtttggtcgattttggcttactgctgcttgtggtaagtaggtgttgctgtcccagtcaattgcaagaagacttcgctcgtctaccgctcatgctacggcagaaactgcgtctcttgcttggtaggaagcacatacttgtcagccagcacatccgcaatccaagcattgatagcgtctccaatcgggtcgacgcgttttctggacgttgtgccctacacccgcaaatgcaaggcgcggaccaccagagcacagcctctccagctccaacggaacttcttcttggatgtactcgtcggtttgcgaccaagcgaccagtgttggcatgttgagactgtgcaggagggcgacttggtctcgcaccaggtcaaagtcggtgcttcttgcgcggacgactgcggcgacgaacggatccacgggccaatccgctgggaagcgcagcagcttggtgtagatagctttgacagcgtgggacgctatggaggctagaacagggtttcccgaccccagcatcttgatcaccagcgcgttagcccgagggcgcatgacgtgatggcttgctacaatcctcaacttcccgtgtgttatgttgtgaatcagtttcttcttactaatagcggtgcaatttctgggcagatgccgcggctgcgaagcaggctcaggagatgcccttgggtcgtacgggtcacactaccgaagtataaccaaatgatgttttgtaccttcctattcagtatcaaacggtcttaattcgtgcacttgatcggtcggctggaagtacagattccatcttactcagttagcgatcgccttactgcatgatcaccattaacgttgtccagctgattgaattcatgttgagcaggttgggttttattatggacgatgatatggtggataagagaatcagtaagcgttggtttgagtgatattttagtttttttcggctactatcaggtagttaaataagctatgtactgatatattggcttgctagcctggtactgtgggggatatttaacgatgcccacccggaaatttgttgcaatcgattcagcggccaacggtggcaacgccaaagccacttataatggttcggaaagtgtttatttactactgtagcatggaaaccaggactaagcaaaagactattacattgatttacggttgaaagaggtcgaaagctacgagatgcggcacgagatcccttgctgttacgtcaagcctcttccctgtcttcatttatggcggcgacggatgactcggacatgcaagttctagttgatcagcatgtgtgcaacgttgggaacccgcgcgctgtctaccactcatgccgagcaccttgtacacacgtagcgagtctaacacagtaggtttgggctcataaccctgttgaaatgtgaaagcaagctaacgagcgtccacgctcagcacaagggacgaacaacaacaggaattcacgacactaaacgacacttgttatatactgggcagattcgagactgaggctcagtctcgatctcccttgcctatcctactaacagatactcctgccagcgactctctgcagctctccgtagccgcacaatctttaggtggcaaaggccacgacccgttgcacaagatctcacagcgctgaccagctcgtcgatgctccagcgtcacccatatttcaacaacgactacgacgacctgctcgccaagatgtaggagatgcttctgggcttcacctcaccaaggcaggggcgagtccaatactttgcgtcgcgaagttaggaccccccccccccctccaacatgcattggtggactctagtattacagtaatagtgcttcggttacgaagtatgggcagcccaatcaggattaattctatgcacctgatatgtggcgcacatgaagtaaacgcatactgaaatcaagtaaagtcatttaataatctcagaaatcgcatggtttcttgaaattcacggaaaagtagaggtgttttcggtggagtagcaaactagttgactaggatattcgtttccagatattaagggtaaacgttaagtacgacggtaccagctctgtaatgtttggatgaaggaggacttctccgaggagggtatttgcggatagcgggcagtctgggtttctagttgctatgcaagtggcttctgcagcgattttgatctatctacgaaagcgcggagagtgtttggcgcgctgctactaatatagaataatgctgaagtttaatacaaatgtagcactgtgcgcctacgatagcatgagcgatggcgagatgatgaagcgaggctcggtaggtagcgcggcgacgtacaggtggtgatatttttttaccgtgagcacgggggggggttggctgctgtggcgaccgaaaaagctgaactgaggacgagtccacctcttttagtttgtggtcgttttcttcaaggaaggatccgtagtctagatcactcacagaatttttttgcggatcgacgtacctagtccaaatcactcagtgcgaaatcccaaaggaagttccgtagtctagatcgctcaccgtttctcggaaatgttttggaaccatctattgcagtcaaaatcactcaatatgagctgacacaatgaaagttttcggacttgtcacagaattaggctgagttcacgctaacgcgagctcagtctaagctgcgatttggtagcacttgcgaggaagtaggtgttgagtcggtttctgacgacgagttgttgctgatgttgtagctgtagctgtgatattccttcaatcctgacgtcaagcacattaaattaaatataacagattggcgagattggccaacaaatcaacatttgatgtaaaccccttaaaaatcgctagtacccaaagcttgcagttcaacgttaataggccgatctgttaacagtattacaagcggaaagtcagtgaatgaatgctctctatcggaattggtccacctcaaaaacactctataaaaccttgttatactaagcaaccggtaagctacgaaacattgcacaataaccttcgcagagttataaggcaaagcgtcatcgaaacacgcagtatgatctttcgtcattacccttttcgccaccccgtgctagcgtttttgtttgtaactcagctagcgtttgtccaattgcaacaaaaatgaccgtgtcttcctccggcgcgctcattagtatgttattgcgtattactgtaaacgcgatcggtcacaagtggcagaaaacataattttgaacttggtcttgatcacggcaaggaacgtgagcaagcttgggtgagaagtcgcaaacgactcgttaatagcgcggctgaagatgtccaccgtctcccaaatggtcttgtatcctcgactagctactcatttcatgtccacccgttgcgacatgtaatttagttgatgggacaatgtccagaaaactaaatagggaactccccgtaaaatatcccttaatcttccgtaatccgactcgtaaactaccccaaatcataaatgacgatttccgtgatatactaacgcattgcattatacgttgggccaccccgatcctgataagcgcttgtgcgagttcgctgatacaagcgacgaacactggagcgccgcgttaacccacgcgccgcacgacttcaacataattttggagctcggtgtcacaaacggctaatgatgtcagaggcgcattttgggtggagccaaacgcaggagatcgtgaaaaaaagatacatttgtgatagtgaagacctccaagtgtgctggctatttagttcgtcgacccactggattcagtctatatactaatcacagaagcttgcgctccattttttgcgtccacgaccatatccttggcagtttgcggacaagctgacaagcttcatcgctggtcacttttgcggatgtatgaaagccaagccatcccggtgactcgaacggctggcatgaccttttgtctagctgagggttatatttcaccacggcagctgctcatatcacttgcagaccccccccccccgtgattcggtttttcaatggtcaacacaggagtgggtaatagtagttcaatcggtggccgtggatattccagcagatttgaagctcggcgacgatcaagtcttgggtgataacgtggaccgagtgtggtaaccttttggtgccccggaacttagctccagatttgcatcattggtcatttttgaggtgcacagccgacaaacattgtgtcgaaatacaccttgtctgatatgaaggcggttccaaggcaggttgttgcgcggtgcctccaatacacacaatgtatccgatgagccaccatttccccagatctctattttgtgtattgtttttttgtggttaccgtcgatagcactcggggcgagcactgcatcaaaccccactgaccgggtccatggggtacccgctgactacggcaattttccagtccagctgctggtgctgagcgaccaaacgaacaaccccatcaggagtccttgtataaggtaccggagttagcggtggcaagtatgtactcgtttcgaacgtgtgcctctttaatctcgacctgacactttgtaactaaaatttataactcgtaatcatgagtctatttcagagatcgttgatctaatacagacttttaaacagagttttgttattctgtttggtcaaaatagatgcaaagcacagtggatataataacaaaacgagcacatcatcttgacattaaccctgatttgatggctgagctttgaccagctttttacttcaggattgatctagcgtcagattactggaaattccgtttgaattggcacttcgagcccaggaaaaatacctgctgctagttataaggtacatatacatgcattcagtctatcaggctctgctaggaggatcgattatgggtgctggtctgtttatatattcattgttatttttcgatctaactggatttgacggctaaatgcgtacaagccacgatagaaccttctaaaatgacgggtctattctttatgaaagcccggtgtaaaacttcagcttacttacgtgggcttctctggttccgcgagtcgggaggtttccgattcgaacacccaatccggggtagtgtttaccggtcgagtgggccacactatttggcgcggagcttcgaccgacgacgtctccacgcatctacatagtatctgtagtctccaattgcaaactggaccatattggcagcgttttcccacttttgttcgcccttgcttcttatcgtttgctttgccgttgcgagctgcatgtgtagattctctagcttcttcacatcctcgaagttagcaccgcgaattaaagcgatctcggtgcgttggtccaattgatggggttcatggatgcgatacctatcatcgccgtgacaggcgccacccacctccagagatgctggcgacgatgcataaaaagaaaaaaagaactagttgcacggtttagatcacgcgaggtctatcgatctctgcagtcgccactccggcagtagagcacggtaacagcgcagtacttttgtcattaggcatcttccggccgcggaatgataatgggctcctagggtgcgtatttatgctcggatcagaggaatttccataaatcagtgattttcactgagatttgacaaaattgttgtgacagtttgcctgaattcactgacggaggtatagtactatagtactagcacatccatacaattttcaagtcaaatttgaaactatagtaatactacaaacagtgcacgtaggtagcgtgttaccttctacaaaaatactatataaaatagtagtgcttggtggttatgctttttgcactatacaacttgtctgttattctgcactaatattgactactttattgaagaaactttattcgttggtcgtcttgaggactcaacaaaatgcaagggtctaagcttctccactattgttttgcatctgcccttccgccgacataacccagctttttcgcgatagaacaaagtgtataagctcaacggacccaggagatggtgaattctctaaaataaagttgtcatttggcttccatgcatccataatagctttagataaaataggttatcttcattagacaaggttatgtgaagccaagtacccagtcctattaaagcgacaaagtagcaataggatagccttctcctgcaaactaaggaatgaaccgcgttcgagttgaacgagattgggcttttggagttgagtaagagattctgatgtgagatcttcaccttcatcaattcctttatcttaatttctgagtctagaaccctctaaatagttaaaacctaactttaaagggaggcttcatctgatcggcttcaaatgatcggatttgggctgcgctagcagccttactgctatctcagaataaatgtagtttggaaatagagacatcttaccaaaaaaaataaatgcagttcgtgtaaacacctcgttgaggatgatattatacagtgttgcagcaacttgcgcatgctcatgacagcaaatactgttcgtactggtatttcatattgcgcaaaaaatgcgatgtccagtaaattatttcagatagaacaccagtgattatttgggctttcttagccctgatcgttagcaaatagctttgcgaactacttggaaaaagagctacgaaacagcgggttacagttatgcaactgtaaatattgtgatatggtgactacttctagtatattgacgactcatagagtaacggatgcccaccaggctgcacaaatactactgaattattactttttaccaaagcactgagtaagtagttttaagctatcactatcattttgtcaaatatcagtgaaaaatcactgatttatggaaattcctcgctcggatcatcgcgttttaaaatttgatcccttggtcgaaaacccagctgtggcacacgctgaatacaacaaagtagtccaacagcgcgtcgtatgttgatctcggccgtagctgccatgttggcttttcacacacgcgcccaaatagcacaaccaccagtgcatttcagattttcccgccgctaagacagaggacagaacctcagcgcagcaattgcattgttgccatgacctactcggctgattttcgctggcgtgcagtatcgctgctgcccgtgtacggcaacaacgtgaacttcatcagcgacacctttggacctaatcctaacacgaaattttgctggtacagccttttcttggagaacggcctcattgatgaacatgtggagccgtctcgtagttcaagataaccaccagaggttgttgctgacattcacaagtatgtgaaaatgcatcttgttttctatgttgaaggactgcagacgtacctacaagaagaacaccccgatgggtatcctcttcaacaatttgccgtgttcatcactttgatatggggcttactcggaaagttctgacacgtgcggatcgtgaaagtgtttctgaggaggtatagtaattttcaaggctgttataacaaaaaaaatctaacatcgatttggtttgtatttaaactgctaggtgcaaaattacaaagagaaactcctcgcaatctactcctaccctgagcagctcacttttatcaatgagacctcaaacgatggtaccaaaggatggcccgcgcggaacaccaagtgcatcgtaaaactgtcaatcagcggcgccctatatttgcagcactagagcatcaaggattcgcagcgtgggagccgacgccagaaaggaattttactcggtctacattccatcccgctttcatgaagaacaccatccctcttcttaatccctggcctctcccaagatccattgtcaccttaaccaatgcaacaaatcgtatgtacagcgagctggagcaagctgtacacccgactggagttagaattttgttcttacccgtactacccggagttaaatccgatcgaaatcggattgagctgcataacgcggagttcaaggcacagaaaagctgcgctacgtaagttaatattgcgataatgttgcatttagttactttatagatcgggggagaaggacatatcgttgagatcgatgagaccagtctcgctaagagacgtaaatacaaccgcggtcgttactatcaagagttctggctatttgctgatggtggtggccgctcaactggatgctggttcgggcacattgtgtacgacaagcctaccaaagaaaccctgctccctatcatcagaacacattatcaagcctcggtaagttttttgtttgtttctatcacgtatttatatgtcaccgatgtattttgtatgttgctaaacttagaactaaaatcatgtcgggcatgttgcaacgtatgtctgtgaacgtggctacaagtagcatgctcgagagtacaactgcttactgcttagtatgcactatacccacagtacggtgaaccacagcctcaactacgtccgccccatcatcggcacccacacacacaaataccattgaaatgcggtgggagactaaaattaaacggcacatcatgagtatgcgaggtatgagtaaagagaatcttgactcctacctggtcgagtatggcgctcgagtacatgtggtgtcgtcgtcttagggggcaacttcatcacgcgaacattgctgagcttgacgccttcatcactgtgcgaggaagcgttgtcgatgaagtgcagtatgttgcggtgttgagcactcctcgactggtcgacgtcgcgcagctagccccgaaagctgttagtcgaaattcacgttcggtagccacataggagtagacgcatagaaggtatcgcaggcttactgttaagccagcgaggcttggaggctttgtcaataattaacagcggcatcttgtcagtgcccgtcgcgtttgcgcacaccgctagcgtgagttgcaccttgtcttgcttcagcgacgggccggtgttgatgcacagcgatcctctcggaatgttgttatagaatatactagttttatccatattagagacgtcggcgtaggagtacgagcgaatgatgctggatgtcatcctcctccgcgctcaggtccatcacaccgtcttctccatcagaacgccgccactgaattccatagcgacgctgcaatcgatggtgccacgacctccccaagcggggccatgctacacaagggctgttgagccgttgaagcgcccaatgcgctctggcgacgccgagagagccacttgcatacacgatagatacagaggtatgattggtaaaagaatattacattgactttgatgtgggtacaaacttagattgatgagctcgcagtgaaaataaattctcgggtgggcgactttactgtacggcgtttggtagatattttgtaatttaattgctgtgcttggataaaaacataaaaacacgtttggtttgttgtccgatcagttgtataaagtatgtcggattcattatatctgtcggatttcagcgtaattttcatagctcaatcaattcttgtccgatttcagaaaaatgaccgacaatcgttactacttgctccggtgccctgattggtaaagctatagcgatctcccccccccttctttcacagcgacctgccgggctcggtgctgggttactggagccaaccacagcctggtgcatagggtcgagaccagcgcgaacctcagccaaatgggcgatttggcagcctgaaccgcaccttccgagctagagtcggcaacatcgggaccgaatagagcatgcaacgaggtcgaagcgggcaggctgtgaaagccgtgtttggagcaacgccaaccagaagattcgccttgttcagtcctcgcagcttgcgcatgagttactcaatttgctccagatcatagttggagaggtgcaaattagccgccaaattgaacagatggctggtgcaggcaacgaacggcagcacaagcaaatcagcccacctctttgaccgagcttgtcagcagctaggtagatgatgcgggtaatgtcccacttaacaaatatagaataccggtccggaaagcgacatgactctcaacagtctgtcctcgacgccttcgtccacaatggatgccagttctgtagaaccatctcggagcgctggccgtgatcaaaacgccaaaagcggcgacgtagtggtccgagtggatggtatactgtcaagaatggtaccgaattggaggggatgaacgcgctggcgctaaggttggcctccttggtaaccaagacggcgtgattcaacagcagctcggtgccagtccgcttcaaagtcaattacttctccacagccgggtcctcgcagaacgaaaaaggaatgttgcacttcgtaacgagtccagccagcagtaggcgctcaggctcttctgataaatgaaacaaccagcgtccccgatttgaagccactgtacgtcagcgaggttacataggcggtgcaagtacttggctaccgtaatccttatgtacttactgacgttcagtcattaccgacaactctgagccaattatagactttcaaatattgcatcgttgtagtttaagtccttactgacagcatacaaatcacaagtcaaaacacaatttatgtattgcaggtcacttttattctgagtcattgggatggtgccttcaataattttgcttgtcagttagtacataaggattacggtaaagaggttcgggtagccgtcttcatgtttccgcactgtaccacactgacagaaaaagtgttcgattggctcgtccagaagtggtgtgaagaaatagaagcagacttgcttattcttgaaggatgtttgcaaatgcatgacgaatttaaacatgatagttaaggaatggtaggacgtaggcgagatattcattggggtgataattgacgccgcgccaatcttttatatggacgggacctcgttcatgccaaagacagcgcggcgataagtcgtcgctgggagcggccaagccagcgtctggtgcaagaagacggagccaagcttccacatgaccgatgatctttgtgcaatgacaggcttctttgaagagaatattgcccacctctcgaagtcggtggtgtggatcatgaacaatagtgcggcgcagattgctctaagcggtggaagtatataacttttgtcttcacatatggtttaacgcagtaatgtgatggagaggcgactgctatctctgttgagtataggatcattatcggtgcgttgccagcaagcacgacacacctgtcccgacccctagacgtggcgttatccgagcggcctaatgctagagcggttttgtgcccttggtgatacatgtacggcgactctgaagacggcagtaggtggtatggcgtgcaccgcttatcgtcacgcgtatatatataatgggattgaaagttgcatttagtgctgctatcgcagaccaaatcggatatattggcacatcagtcaaacgacggtcccacttgaccttcggtacatctccttgggaacctgtacaggcgaacagacaggcacaatagagcaggggggggtccgttttggggtccgtaatttaaaacaaatttggtttggggaccattatccaactgatatgttaatttgagcgttttattgcgcattagagatgatctagagggcactaaggagtcctaagctatggtttctgttgcttaattatatgcagaccacttcaaaagtgggaaaatttttaaaaattcccacatttcccactttctggcaaattgagaatccgatacaatctctaatatcgccccacatagggtgggaacaaatattagtaacattcccacctttgagctgtacccatcttcggaatatcagtgttaatgtattgatttccacttttcccacatcctgcctccagaagaggtcacttcctgatagaatgtgggaaaagtgacttgtcccactttttaagtggtctgattatatgcgtagcttagtggctcgttttggggtcagcagaatgtacattttagtggtacaaggtgcgtcttcgattcgtcttatagaatcagtcgcagggatcaggttaccgtatttcgcatgtaaagagctgcactggtctaagagatgcacctggactatccaatcacacgaaggtacccaccgatatttgtccaatcatatctaactatcatacccggctattaactctgggggacacagaagtccagaccacaaaacgcaggtcttcgggagtgggtccaaaagatcgacatttaagatcctagctagtgttaatagatatggaaggaaccacgctaaccatttaaagtgagggtagtcactctgtctagttcgacatatcggccgagctattcgggctcaaagttggcacctgccgccatcaaggccgagatgtcttcacctctttggtccatgtctttctatatcacttgcgttttgtcagattgcaccgtgtaactgcgttgtgtaaccagtaacccatagtaaaagcaagtatagagtaaccacaagcagtccacatagttttcaacgtgacgattgaggaggatgtattgcacatcaagtgcacttaccaggtttcctcctcgaagttggtgtctttgaggtttccctgtagcaactgcatgcatgcaactgctccaacagtactcctaacaccaagttccaattgcgctgattccatagacgttattcgttctccttaggtgctgcagttctttaaaaacaaccggagacaaatcatcaaaatcttgacgatctaatctaatgcaagataccatttattttaaattctgcgctcgctcgctttcaaacaagaaatcagcagtgtccactctgaatagtttgcatttaagaataggcaacacgtagtgtcaatgtgccttcagaaatattagcaaagttggattttggcttaccccaaaatctggcctggtgttctgattccgttaaagttaagaatcatacaccatattgtaattgtgtctaataccatatgtaggatgttgtatagagccctcttaagtacgtcatcattgccaggtgaacattaggtgcagctttctacatgcgaaatacggtaactccaggttttgagccggcaaagctttttggaccagataggatgtgagtgcaagtattgtgaaaaccgcttcttttgcctattttggtcgtaaatcgatcgattagcaccctgattgagctcgatcgatttgtaaattgatcgcgcccctgcgatgcatatgtgagtggatgtgcagattaggcgatcgttttttggagaccaatccgatatagccgcgtttggagcagaatgcccaccttttactgggcaatcgcgtagccaagcgatgcgtatggaacaggattgatttcgaacccgaattatactctgattaattagataattgcacccctcggacgagacgagaaaaacggagacgatattaccggtttaccgtctctttatgctcgagaccagtttcctgaaccggaataccgtctcctactagaagtcgcgaaaaaagcgagatgtaaccaccgtctcccccctcaccgtctcctgtatccaagtggcgtactttgccgggggcccggggctcccttgccgggatctaggattggacaaaaacccttcagttatcgtgcaactcttaccgaaaaggcacagctaattcttagtgttgcgcctgtcattttggaggcttttagtaacgtatcatgctggttggcctgtcccggaagcctggcaccacatcgtgcaagcagacttaagatgcgcctgtccccaatccatacgtaagccttacctctgcattgagctcgcatccacccttcccttctccctcacaacaacatttacgctcaagccccacagtagccccccaccccctcgccaccgcctgccgcgccttcatcctcaacgctcagcatgtctagtgtgcatcctacggtcaaagacgtggtcgccaactttcaaccccctgctggatttgtggtcctcccgccaagacgtagcgagacatcgctaatcttctatggggttcgaattgcggaggcccagcgccacctgcaacttccgtggacgcaggagttcccgccgtctggatgtgtctcgcctccgaggcctgtcgatcgagagcggatgtgttttaccctttatcaacaggaaaaacatccaaggcgacgaaacatctgcgtgaagcccatgcaatagtgtctggcaagacagcgggcgagttggaaaagaagcgcgggcgtgacgaggaattggatcggcttcggcactctcagatgttcagtgatgacccagcacacgtttacgttctccttgaaacgattcggatcatcaacaacaacctgccataccgtttggcggagtgcgaagagtccatctcgatccgagagcttgtaatgaaggacggaatgcatgctgccgtcaacgcaaaagtcgtcgtccacgccacgatcgagctatacgcttcgtccaaaagtactatttgtcgtgaaatcaatgacaaccgagtcggacacgcagcgacattcacggtcgtccccgacttttggactccaaaaggcaagggtgctaagtttttggggctccggttgtatttcatcaacaagcagtacgagctcaagactatcctgctcggcgcccgtcacttcaacccgaagtacagcgagaggtctggtggaattcgtgcgccatttcggcggtggcttgatgatattttgatcgattttggtttgactcgggcggacctgtttggagctacaagtgatgcgggtcctgacgtgaagtggatgatgaccaaagggttgtagctcaactgggagtggtgtataccgcacatggcgagtgctgccacaaagaaagcttgtggtatggtcagcaatgccagcaagtccaagaatccagctatgacagctctgatcaagcgcattgttaagactgtctatcagacaaaacatgtcgaagtgatggggtccttgttcgtcgagctgtgcgcaatggagagcatgggcgacaaggcgccgcagcaactgctagaatatcgctgcccgtgtggttcgccgcattttaatcctgtgggcacctctcgtgggttggtacgaggagcgtcttgctcaagcggatcgtgaagggaaggtgcctccgtgtgcttttccgttggctaatgactacgacaacctcactcaggtgttgtcgctgctcgagccaatcacgctactaaatacaagggctcaaagcgaatctgcaacccaggttgaagtacttttgacgctgctcgacctgcggcgctccacgctcaactgcgacaaggttctccgcgactatcgatctacgaaggagagggaaacgtacattcgacttgatcagcttactgaactggcacgggagacgcggttgaagcttcaagaagaattccagtgtgtgttcttctcccggtatacggatcgagcgaaaattgtccaatgttcgtttttgtttgagatgcagctactgctgcaccggaacttcaagaatctggacagcattctcaaggacgttgtcctcctgtgctctccaaaagtgtcgtcacacaagggagcaggtgaagtcaacttttggaaggtgaaatattcaattgtcaccaagacgatagcattgatgcgaacagtggccgcagaatctcgacggcaggaaacacctccccccgcttttcccaacgttgccttctccgaagatctaatggagctcattgacgactcagccgtctcgcagcaggtggatcgcgaggaccagcaaactgttcacgacagcagcgtggagcaagagctacgactgtagatggcgacgccaacttcgcttcgactggcagccaatggaaaagctgagtcggtgttgtcgtattggcgccgagaggctgcgtctaatacctatcgcttcctcccactggtggccaagattctctttgctgtaccagcttcgtcagcacagatagaacgtgactttggtacagccggtcgaatggtgacacccgagcgctcgtcactgtcaccacacaacattgatatgtcgacgttcatcaactgcagcagaagctacgtcgacatcactcaatgccctaaaattccggccagcgcaatcaccgcatatatccctgccaatatgctgcttcccgtgacggtcgaagagaatacggaagccgacgatgtcttggagcaatatttttccagtgacagcgaggacgacgacgaagataacagtatttagacttagcgaaaatattcaatggatgagagttttattaaatgaacctgagagattttcaaaggcttgatgctactatcaaatggggtggtgatcgtgctcaggtttgctgggttttgcgtgctactttacggaccttgctaagctcgttcgccaaagcgacacactctcgattacttaatggagctggcggcggcattgctcggtgtcgactgtgtgcattcttctttttgttcgctagtttcgttttagcagatgaaagcatcaacgctttagctcgtttgcgagctcgatccgcaacctgcctctggggtgcttcagatgcaacttttacgcgtagtgcattgcccagacggacgatcagatctcgccatgtgattacttgatgtggatgtgtctcggagaggagacattgtccaaacttccgtatcgctgctgctgtcctcgtcggtatcctttgcgatcttcagcggagcagcgccagtaacttcttcctctgcgtcctcttcacgaacttcgatgccaggcgggcgaaacaacgctgcgtcggtcagctgtctattgcgaaaccttccaactatcgcttccgcacgtgcttcagcatgggcaatcgcctttgactcaatttcagccagagcggagctcaaccgggcttgaaaagctgcttcacgggcgagattggcgcttgcgaggtgcagaacgggattttttctgcagccttcaccacgtgctccatactcgcttccatcttctgttcgaggctgtgaagctggtgctgcgtcactaacgccgcttcatgcacttggtctttgatagaagcatctgttttctctttgtagtggcgaaagtatgctatgagaagctccttggtccgctgttcagattgctcgcttacatctttctcgagttcgttcaaggctgcttgaaacctgcgctcagtttcttgctgcatacgagcactctctgcagccacatcacgagattcggcacgcgctgcgtcgcgtgccacggcaagtgctgcgcggagttgagtatcgatgtgttgtgcgattgctcctgggtccgcacgagtttggaagatcagcgacgctagctcgtttgaccgcgcttcagcttcggctcgaacgtattgaacgcttgtgtccacgtagtattgctgttcatgggcttgttgatcttggcgtagttgaagaagctcgtgctggtcagccaacacattcgtttgcgccgatacatgggcaatggccatcccaagccgccggctatcgatcacagcgctttcacggctgctgcgcacgatgacgagctcctcttcgacttcctgtatgtgaacgttctccatgcgatcttgttagcaaacctggatctttagcttaaatgatcgagctatcaccgctaaaacgtggttgctcggacatagtttcaaccagttagattgcctcacaaataagccaataataatgcagcaaacgaagacggagggagttttgtgagcaatcgaagccgtctcccttctgagtagtcacgtcggaagggagccttttaaccttaggagactatctccataggtttttttgtctccctaattttggcggagacgcgtctcggattcgtctcgtccgaagggtggataattgagatctaactaggtcgtcttcgacttggctgggaacaccagtggtataaacgctggtgatggtaccggtgctaattgccatgataagggagaactgtggcccgcgtgattcaagggcgtggcccctgcggggccacacccatgaatatcgcgcgtgccgcagttcactttctgaagctggtgcatgggtctgttgacgtgcatttcctgttgttgccgttgaacctgttcggtcgacatccttctggctggtgtagcacgaaggttgcgccaggttacgcttacgcgtccaattaatccgttgggagctgtcattcttcgggtgttcccagtataaggggtttctacagatgggcgtattagccggttctcacaataccccaccaggcttaagaatagggctcatattatgagtcttaacacctttaatgctcaattaaacgctgaacttaacaaatcagtgagataacggaccccaaaccgaattaattcaaaattacggacccaggatttcccctaaaacgaatgtacctgaaagatggtacatggctacaggcatgaagtacgagagccactccactccaccaaagcacgttaccatggcgacaggtgagttgatgatccccccttggcgccgcctctcagctatatatcgacgactgcaagatgcctacctagtgcctatagtgcccggagcctcgctccaatgcctcactgctatcccccgcccgccagctcctccgtctcaccgtcatcccaatgcgtatctgctcctgcctgtactgtaccgcagctaacaacgcgaacgacgtgccgcgcaccaagttcttcctgcgcggcaagggcggcatcgagtccatgtggggcccgccgtcctccagcaaggacgaggtcaagatcgagcgcgacgagaacttcgacgctccgggcgccgcggacctcatggagttcacggaggacggcaagctcgtggtgctggtgcgcaccgcctcgggcttcacggtgcgcgacgcggacaccggcgccgtggtggtggaggcggagaacccgggcatccacgcggtggcctggtcgcctctgggctcgcagctactgacctggcagcgcccccagaagaactcggacctcggcaacctcatcgtgtgggacgctgccactggcaaggaggtggaacgcttcaaccacaagtcctacacgcgcgacgtacgtcatttatgctgagtggttgactgagtgaagcgtttcaagctaggactaaccattgtgggcatggtgcgttcatcctgacagaaatggccgccgctccagtggtcctcggacgagacgatctgcgcgcgccagagcgcgaacggcgtcgtgctctacagtggccgcgacattgcggcgggctcgattggccagattaacctcccggtacgtgtcgtgctggattgtgttgctcgtggatatgccttgctgacgatattaattgggactggtgcagaatgtggcgaacttcagcgtggctcctggcagcgctccgtacaaggtggctctctttgtgccggagaagaagggcaagcctgctagcgttaagatctaccagttcccaagcagcctggacacccccacggccacgaagagcttctacaaggctcaggacgtgacgttcaagtggtctcccactggcagcgcgctcattattgaaacgcgcacggacattgatacctcaggcaagtcttactacggcgagacgggccttttcttcctgcagagcgacggtgagtatgactgtatcgtgccgctgacgaaggagggcacggtgcacgacgttgcgtgggaccccacgggccgcgggttcgtggtgattgctggtacgatgcctgctcatgcgaccctgtacgacaacaaggcgcttcccgtgttcgagttcggcgcagcgcctcgtaaccacgtgagctggagccctcacggacgcttcctgtgccttgctggattcggcaaccttcgcggtgacatggacttctgggagcgcaacaagctgaaaaagatgggctcggcgacttccaactcggccacgacgtttgcttggtcgcctgacagtcgctacttcgctacggccactacgttccctcgtctgcgtgtggacaatggcttcaaggtcttccgctacgatggcactggccccatccaccaggaagagcgtggcgagctctacgatctcaagttccgtccggccgcgcaggacgtgtacccgaaccgacctcagtctccgcgtcggaagggcgaggaagagggtttcggctcatcttcagccccgaaggcagcgccgaagccgcaggcttaccgtccgcctaactcgactggcgccctcgctgctatgatgcgcaaggaggaaggtggctctagaaagctggaccgcaacaagtacgtggctccccgtagcagtgcccccacggttcctggtatggctgcgccccggtcaattcctggtatgggagctgctgctgcgcccaagaagctgagcaagagcgcgcgcaagaagaaggcccaggaagccgcggaggcgagggctgccgtcgaggaggcacttgcgaaggtcgctggtgcggcacctgctgagcaggctccggctaagccgagcccggctgagatgacccccgaggagaaggccaagaaggtgaagagcctgctgaagaagctcaagcagatcgacaccatcaaggcaaagaaggaggccggcgattcgctcaacgacgatcagctggagaagctcaagaccgagcaggctctgcgtgatgaggtggccgaactttccgcgtaagcctgcgtgcaaagagaagaggtgaatgcgttagagaacggtggatgggcaagcaatatagagcgaaggcggcgctgtattctgcataagtagagcgcgtttcttgcgttttcataagggtgccattacgtcgttgctattatcatgaatctcacggcgtggcacttggtgcaaagtgccctgatgctggcatgactttgttcagaacgaaggcagcttagcttgcactaagagaaagtaacaagcaaacgaagcgttaattgtttgtctgtatgctgggtctgctacgctacgccgacaccacctcatcgtggcatgagttcacgaacttcctgcacatgttcgagtaaactgtttttctttctcttttggtctcaggcgcttttcacccgaggattgcgattttatcgccaccatttcctccattacttgtcagcggtttagatgatgccaaccttgacaagcatcgtgtggcggtccaccttgctccactccgagtccttcatcgatcgatcgaacgcgaacttgaccttgagctgcttgcccttcgcggcgtaaaagtccaactcgtccgagaactcgacgggaagctcacgtccgtacgccttctggatacgagcgcggagagcctgcacaacttccgtcttctgggaaacctgcaccatcaggtcgatctcgcccttcacgcggaagatgaggtagttgtccggctgagtgctcatggccaggcccgtaaggcgagccaactcgaacacacggcgctccttgggctgctggatcttgtcagccttcaggttgaagacacggctctcgctgatcatgagcacacgggtctggtgggcccagcgctcgttcaccttctccaccgtgcccaagaacagcagcttttccttctggccacggccactgccagccttggcaccacggccttccgtatgagcctggataatggaggcgtacgcggggaacttgttcacgccgatataatcgccgtggtacgtacggtccagcgagtcacggcggcgcttcttcttgcccaggtagcgctcaaactcggtgcgaacgccaagcagggcgaccttgcacgatctccacatgtcgttcgcaagctgcttgcgcgtcttgagaccgcggaagtgcttgctgaacactatttgcgctcgcttgagctccagaaacttgcggcgctcggtgcgcgcttgaacgaagctctgcataaagaccaccgagttcagctcctcctcctgcttgaggttcttcaccaggcggctgttgttgacgttcagcagcttggtagaaaccacatcccagttggcgtaaatcttagcgacgttctccttgttcgcagcaccaggcacgcgcttgcgacgatcctggcagtttttccacacggcaccatacgcagtgaagagctgcttggatgcagccgagaacgcacgaagtgcaatgcggttcttgtagcggcgccaagcgttctcgataatgttgacgatcacgggaatacgctcttcgcgcagaatctccagagctgacagcgcctgcgggtggcgcaggaaaatcttgttacgaccaaggcaaaagcatccaagcgtgtccgagtcctcttggaacggaatcagctcgttcttgttgtccgggtcacgcacaccaatcccagccgtcgtaagcaggtcaacggcagccttgcggctcgagtgggcaacggggttcggccacgtggacgccgacaggaagctgtagcgcttgatgaacgggccgtatggctggctgtagcagaagccctggcgacgcacgctcaggttctccaccagaccaaggtaacgaacctgctcggcaacgagctccttgctcacggccagcggctgcttcttctcattgggcttgatacaacggatgtagtgggggttgcaaccatccagcttctcgagcaagtcggcgacctgcgtacggaactgctgcgaagtcgacggcgggcgcttgagtttctgctgcttggtgcgcttgtcgaggaaaacctcgcgcacgaaagcattcgacgagtgctccatgccgtcctgcaggtcgttgaagaacgtgtccacgttggcatcgaagaacagcgtgacgtcgtactcgaccttcccggcgtagtgcacaatgccgaaggtggggccacgcacgcgggacgcaatgtagtgcgggtttctcgagtgctcgctgttgtagcgctcaatcagctccaggtccgatagacgcgcaatggcgcactgctcgtccagcagcgggaaaataccgtgctgcttggggtcctcaatcaggtcgcacacaacctggttgttgaagaacttgatgttctgccagctcagaccctcgcgacggtagccctcctgctcgctctcgagcgtctgactgatgaatagctgctggagcttctcgttcacgtagttgatgcaaagctgctcgaaggcgttgacctcgaagatctcaaagccgtagatatccaagatgccgatgctgttgctgatgtcgcgcttcttgcacgtcacgttcgtgttgatgcgcgccacaatccagtcgaagatcttctcgtacagcgagcgcatgatcgagtcgcacaccttcttggcctggcgggcgtcgaacagcaccttctggtcctcgttgtaaatgttcacgatgcggaacgtcagcagggcctcgagcttgtccttgtcgattcccatgaggctcgctgccttagccagagcctcgcgggcctccgggctctcgatcgcggcgcgcgggttgtgcgcctcgtcagtcgtctgctcgaactgcacgttgccaagccagaggatggcggcgagctgcttgaagatgtcggcctgctcgtcgtccgtgatgcccaccgccgtcatgttttggcgcacgttcttgtagttctcagcgtcgtccacgccctcgatggtggcatcctcgttgcccagcacgtcgaactcctcggcgctctcaggcagctgccaggcctcgcgctcggcggccgtagcgccggacatgagctggtagaaggcgtggaagttgcgctcgccctcggcctggcgaatcacgcggctgcgctccagcaggtagttgtcgatgtagccgccgatgacctggcccacgcggttcatctgcagcacgatgtacttgccgaagcgactgctgttgttgttgcggatggtctgcgcgttgccgaaggcctcgagcacggggttgctgccccagagcacgtccgtgacgtggctcgtcatgtcgtccgcctccttgcgctgcgcgacggacatgcggcggttggcgatcacggcgctcttggccctggagcgcgtgctgatggtggtgaggtagcgcatcacgtgcttggacgtctcggtcttgccactgcccgactcgcccgtgatgagcaggctctggtccaggccgaagcgcatgaggctcgtgtacgcgttctcggccagcgcgaacgggtgcggctcgcacaggtgcagctccttgccctggaactcgtcgatcatgttgcgcgcgtagatggagtcgccgttgggctggcgcagcagcttgtacgggttcatggcgatcagcacgggcccgaggaacgtgtagacgtagccctggcggtagcgcgtcacgagctcgtccaccacgtgggcctcgtccacggcgtcgaccatcaacaggtccttcatggtggcccccggtagataagcagaagcttcacggaaggacaatcactctcgaaggttggcccgagctctctctttgccgaacgacgaatgacgtcgagctctgactcccccctctaaagtacgggagaaaatgcggagattcacctgctagaaatgataaacaaatgaggtatgaggtttagaatgagtaaagtactcgccaaaatttaagtttactggtttacatgccggatctgagaaatcatacccgtggaaacgactgtaaacttgaattgtacgcgtaatagtgcgcgtttctaaacgacagcagagcctttccttgtcgacaacgcctcaacctactggaacagcactatgccgccctgtaccgtatctctccatttgctgcctcggcggcgcgagggagggccttgatacgggcctcgcaacgcttcaaccgcgtcgagacgagctccctcccctatacagtggggggaagcaggaggctgaaatcgaggcctgtgaaggcctatccgagcgagtttttaacggagacgctggtcaacagaagtgacttgaagccttcttcgtcgcatgcaagccaatcgggtgcttggctgggcaatccaacgacgccctgcaacgtcggcggcaacattgaagagatcggcgattgctgaactgattcagagcagagcgcgggcgcgctgggggaggatgtgaacctggatcaaagccaaaattgcagcgtcggcaactgcgagcgcggccggcgtgaatccgaccgagcctcggcggcgcaatcagtgcgccgccggctgcaaccaaagcagggccaaggttgaagacctgcttcgatcagatagtaactcgatcaggtagaagtagaaacgtcgcatcgccgaagttgctgtggaactcttgccgtggacctcgatccctgcattgctgtgagctgaccggcactacagtactgctacgcatggttgtattctttcaaggctacccagcggtcgtctcgaggaggctatttttcaagttatatatcttccctaaaggttagcaaggacttcgaccagaggatcctgcaatgcaggacatgcgcttgtccgaaagtcttcctcctcctcgccgcttgggtatattggtggcacttccagactggaagttcgagcggtacgagtctgaatcctagacgctttacgagatgacgcacccgggagcagcgggcggctcgcgtccgcctgcatcgagtcgcttcttctcgatgatgatgttgagctcgaccatggcgtcgtcgaacttctggatgaacttctgtcggtcgggcagcgccctcacgtcgcggtcgtggatgagtcggttgcgcagagtcgcaacgtagcggatcgagcgcactgtgggcgcggggatggcgctctcgacggacgagaccctttcgtgcagcccctggccgaacgcgccgaactccttctccagcaggtactcgagctccttggacgcctcgatggcgagctggtagtcgttgggggagtacacgaaccccttgccggcctgagcattccccatagcgacggcggggactatttcctggggtctctgagatgacgcaaaatgtgtttgatgtgcaccacataaaggcaagttgaagtcgatccttgaagtcgagacgatgattgccttttcattgccgcagttaccaagtcccatgtacgaacagccccacgatgatgataagagaagttgtgtaaagtgctcaccatttgacggccaggtccgttgtggctcctgcgtcgaaggtgcagcgaaagcttggccaactttacctcagccggtggagaagcttgacgacacggacggcatcatacttactgcgtgacagtctcacgtgcagcggctaaactctagactcttcgctggtgaaacagctaagcgatggcgaaacaagcaaccggccgagtggggcaaatcccattcgtttcaagccgacagctagaaaaatattcttggcacgtcacggctacctgcgcttgagtttctccattcttcatttatcccccagcgtaaccagaccgacccccgtctttgccttccgaatatagtccgaagctcgcctaccgccaaccatggaggaaatgaagatggagaccgtcaaggaggggccaagaagagagcagacaggtccggctatcgcgaaacttcgtgagctgatgacggctcgtcggatgctaatggcagcgtgggttggcgttggaatggtgccattcatcctccaagtccgcagctatctgcagttggtgacgatcatcaaaaacctcgtggctcctcctggtgcagtgcgagagactgccaacttatctgagtactgctccgccagtggcttcctcatggctcaagtgtggtggaatgtcgtcccaacccactattacaacaccgagttcggctagatttgccacgtcgtggtgccgcagtacaatctccacggaggctaccgagtgggaagcaccagaactacccccgttccacacgacgccatcaagttgcagcaacgacagctatccgttcgagcaatatctttatcacgggagctttggctactatgcgttctatgaagaagcccaaggctcatactgtgccaaggacgacactgcctatgcggttgtgaatggagttggtacctacgacatcaatggcatatttctggctcgcgattctggtagtacattctatcggtactccttttggtatggcatcgtcggtggaatctggatcttgtatcgcgctctcgtactgcgtcgaagcttctttcatgcctgcgttatgggcagaaatgcgagcggatcggcgagaagcttcatcgaaacgagtccgtggtgttcgcgtacgagagcatgcgcttgtcggcccatggagcgaggaactatcatcggtttgcgctgttgtacttgatcgtggagggcgtaatgagcgacctgttcctgctgatcgcgcacgacggcctcagcgctcagacgcagtacatttcgatcggctacaacttatcggggctcctcttgctgttgtgggaaatcgttgaaagcatgaagtggctcagcgaaagatcgcggatgctgatcaagcggctcctgttcagctacgagttgacggctgctattcagaaccatctcttggtggcactcaaccggtccggtcttaagaaatcgaacacaaccgcgttggctgtctcctactacttctggagcttcgtctggcacacagtttacgttctcgtcctcacgacatacctgctcgtggttcgagcaacaatctccatcgtctacgtgttttggaggaaccgaacgtgggaccttcacagcaccttgttgtgttgatatgacactggggccccgttgcaggatgacattgctggatagctacacgatggagataagctctacatcgagaaggcggcgctgagggcgttcgggatccagatggtggtggaggaaggcggcgccgagttcctcgcgatcgagaaactgcattggctcaaggttccgaataataattgcttcgtgatcggggtcgtctccgatagattagtcaaaccgtgcgttgaacgcccctgtacaggggtattgggcttcttcgaccggaacttgggtggcgaccacagaaccgaaagctctctgtcgctattcatcaagagaagaagcagacgctcgactgctcggacctcaacgagcatcgtcacgccttaatcagtaagtgaacaggaagagcatccgagagaaaaccagttaaaaaaacattcatcattcattacgctgcaaatattggtggtgcactcgtaatattggtggtgcactcgttgttcggtgtcgacagcgttacgacttacaccagcaagccatggatggtttgaaacgtcccgttgttgaggtgttcttcgtgcttatcgcgcttccgctgaacatagaacttggccagttccagcacgacgcacgacgcacgacactgccgaaagccacatcaccacgccagggatgcccacagtcagcagcttcccgttggccgggttacagccggcaatgactcctccgagcaagttttcttcctgattgtacaggtaaatgcccaaggcgatggcgacggcgccgagtagccaagagatgcagccgaggggaaacagaaaccctagtttcatacacaaacaacaacaagttaggcacggtggctagtggcgatgcatgaacaacgtttgtccaaaatctcaagacttacgatcgtagtagaaccacttgcggtggataagttgtccggcgtaccggatgcgcaggcggtctttgatgtactcggggacgtcgacgagaacgtgaaggtcgcgctcacggtgaattgtggcgaattctcccccgaaaacggtcttgacaaccgcggagttggggtccagttggttggttggcgtcgtgatcgccttagcgacgtcagggatggatcctcacttcagcgcggcgacatcgcgagcactcagccacttgccgttctgcttcgcaggatacagcacgacttcgcgggggtcgaacgtctccttggccgtcttcatgaacttctccgggaagacgtcgacgaggtcgtccatgttaaactccagcgtgaaggtgacccccacaccgaggacggcgcagaccagatacgccatcttgcaaatggcgagacctgggacccaggcgcgctggtccatttatcaaatgtggcgtgtccatcgcgtgcgttaatgtacttggatgaattgatgactcgagacacacagttggctttcaaggtctcatatattcacacttgcgatacttaggtactttaattacgccaatctcgggcgttttactagataaggtgtctgggggtgcatgcttacaggctgtgacgctttaggggcaacgtgttgacggacgccgaacggttgtggttggtcttctgtgcgcgtcgagctcgaagaatgagttgctggcgctcacgcgagtactcttccgtaaaggaggcgatgaagcccaagagctcgtcgatcggcagcgtgtcctcttcttcgaaatagttcaaaaagtgtttcctctggacagcaaccaaggagttagtatttgtaaacgataccgttgaatagtgcagttgggcggagcttacctctctttccagttgattgaccaattcctgtacgctattgagctcttgctcgacctccacagcgtacagcctcatgctttctcgcgactgggccaactctgcgcgcagatcgtcgtcgtccgttttgaatactgccgccttctgtgtctcgttgatgagcattctcaatccactcttaagagactggtgctcagcgacgaggctctggaccgatagcttgctgcacttggtgataagcggtagctggtcaccgaatagtgcgaggtgtggctcgtcgcgctataatagcagcaaaacgcaatactgtcagatacatcctcgcccttcacttccagggtacagcacaactcacctcaacggactggataacatagtgcaagaatgaaattcgcccatcataggccttggtgaaggaaagcttcgccaacgagctgatggaaatactcttcacccatgctgtgtattccactccctctccgaagttcagcagattgcccaagtggaagatgtactcaagtacaccagcaaaccggtcgctcgagcaaacttgctggatgccgcgaattagcagcttcagattaccactgaaatgccaaaaacaacacaaatagttgttagaacacgcacccacaccacactgagatcagtcccaactcaccggagttctttgacccgcggggcaaaatccatcttaaactgtaagcagcgtagcttctgctgcgctctggggatgttgcgagctaccatcaaaaattgttcagcctggagcatacaaattgacccttagaacaagcaaccactaggttacaatatgaaagctgcactcaccgttgccaaagttgaggcatccccaccgaactggtcaatggcctcttgctcggcgctgtctggccacatgtcgatgagcgactgcagcgctggactggacaacacgtcgcagttcagcgtcaaaatctcgtgggtcagctccggaaacgtgcgcttcactcgcgcgagcacgatggcaatgttctgggacttcttgtggtcaagcagcacgacatacaacttgcggtgtaggaacgcactgccggggtccttctctgcgacttgcgcctcctccggatccggctcaacctccatctcgtcctgctcgccatcgaacagcgctgggtcagagtttgcgcgctcacgcttgggcgatccaaagcgtgctgctgacgtctgcttcgtcttggctgggctgcaagtggcgctgtctccgctggttgtgcgtcgccgacgtcccactttggccttggcaacgaccttgacaaagagtttctccatccagcgtctgctctccgtcgagatgcacacgcattcatgctgtgctttgtcgtgaattcggctccacagcgaatcccgtcgctgggctgggatgatggcgcctgtgttcggagtagtcgaccagtgcagcttcttgcgcatgcccgtgttcattttgcgaagcgccatcattgccaatgcacggccgttgctggtcgcgacagtcgacgcagagcgcatggccaacgcgtcaggtgtcgacggtgcagttgacacgactgagctgatactggagcgtctggagcgcgtcgctagcattgcaggcgcaggtagatcactgtcgtcggcggactgaagggcggcgagtgaaggtgctccaccagaacgcggtgcgtccagctcggctgggtccacgccttctctcctcgccttcatctccacaacgtggcgcgggacgcccaccttgatcatgcgctggaaagactcgatcttctgggtgtgttccgggtcctcgtcctccaccggttcttccaccggcgggatctcaatgggggccggcaccttcctcgccttaggcgtcgtcgcgatcagttcgtccagcacggccgggtccttgctttcagcgcgcatcttgtggtccacgacgactcgcggaagtccgaccttgagcatctgcaagtacgccgcgtactcggctcgaagagctgtcaatctggccgcagcctgctcttcctccgccgacagcgcaggcatcggagtcggtgtggtgatagtgggctgctgcacttcattcactttgggctggccaacctcctcttccttctcctcctcgggttccttctcctccacggcttcgacctcctcccccactttttcaggaacctcttcactggcgtggtgctgctgcagatgtcgtcgacagcacggcggcagctcgcgctcgttgcaggcgtggttgtggatcgtgacgcggctccagcgcacgtaggccacgagcacgaagctcagcaggaggtggaagatgagccaggaggagtcacctgtcgacaccgaggggcaggcaccgcagtcgagtgcggcgtcggcgcggacgaaatttccgccgggcccgtcgtagactgggcggctcccgctgttccccatcacgacagtgggggctctagcaagcacctcgcggcggcctccaaggcagctaaggtacgtacagtacgggtgcgaggggctctcggcaaagcgctaatgcctcgggcgcaggacgaacaatcaagcgggcagacacctcggggcgccgcgccgcaagccagcgaatgagcgagagcgctcgccccgtccgttgccgccttgccccctgcgacgcccgccgcggaagcttcgccgcagcggcaataacggcgaggtgcccatcgggcgcgaggcgcctgcagccaggcgaacgtcggcagagacccgcgatgcaacttggcactgcagtgcgctgatcggtccaagtgagcccgcgtaacgcgttcctcggatgttcctgagcatatcagaccgcaaagaaatttttttggtgtgaccgctgctgcgactgactacgtttgtgaatgatcaaatcatttggacagagaatggaaaaggacgggtgcgatatagagcgactgaaggacccgtctagtcgggcgctgcagcgcgtgccgtttgaaggacatcggaaggggtggacttcggtcgttactcggcgcctttgaaacggttgacgttgcaatttttggtggatcgtcggcaccggactaagctgcagcggacactattgtaggcccttggcgcaggtctcgagcagcttcgagggcgtccgctgccccactttgcatcgagaccgaggcagccgcgccgcaagtgctaccagcgcatagctgggggcattgctgcgctcttacaccgcgcagtgtcgaccactttttaacttttgttccgacgagaacaagcgcatcaaatccagccccagctgcgcctcactcaagaggctcatctgtatgctccctagcagagaacaatcggcagctgcaacgcctaccggcgagctgtaaggtgagcctgcaggctgcagcaccgatgccggtccaaaagcgcggggtcattttacgagtcacaccttgacaacctggacaccctgcgccatgtcgacgtgctgtcgccggcttcaacactttctgcggtgctggtgcggccgcgatggggagagtcgtgcatcgtggtgggatcctcccgagtcttctgcgcctgtttgctagagatgctgggctctggtgcacttgcggatcgtcaattcgctgcgcttcgaaaccttcgatcagggccacgcaggagatgcaaccggtgacatacagcgtagcgccgcgcgagattcctattcacgaacaacatggatcaagagcaagatttttaaagcatgccgtacagtaatgtgcgtcaataagggacgtgtggcaactaatatccttacatacattatataccgctgtcagtcaagaacacagctaacattgatttaagttaactttcgacaggatcctggcgctattggctggtttcgcaacgagcgcgactacgtgattggctagtgaggtcagatctagccaatcagtgattgaagctaccatttgaattcgggcgcgaacataactccttccctccaacccgctcagcgcgatctccaagcacaacggaatctaccacaacaccagcgccctacccatccacccacctcatgagctcctcctctaagactagaactcgcctcacccagcagcagaagctgcgtctgatcaagaaggctgagagctcccccactgtcaagtatgaagacctggccctttgggccaaagtcgagttcggtctgcaaagtccccctgggaaagccacgatcggccgcatcatctcggggcgtatcgcgctgttgcgccagcctcacgaaagtgctcagcgcaagaacaagccgtctccgttccagctacagaccgatcaaaacatcgtcgagttcatcatgcttgcagaggcggagggcatttgcctcagcggtgcaatgatcgtcttctatgctacggtgctagccaagaagttgggcacccctagacatacagtcgacttaccaactgccatgaagtggtgcgagtctgcgtgggataatgtgtcagcttctacgattcagaagtgctggttgcactccacgctcattagtaaaagcagtgtgtcatttattcttaactaaatcaatacattgttctttctttttccacttgttcgccttaatagcctttacactcctattcgtatcagaggtcccttattgacgcacattactgtacatgtatgtacatgtatgtacagtatctgttgccggaggagagtgcattggcgtaaaccgatcttccacttcgtagggattgcagaggttaatgttcgtcgaaaggcgcccgcaaaaagtttcatcccgatactacactggtactttgctccaaaaagtcgggagcagctaaggagctcccatctccggagctcccatacacaaacaggccaatcatatgcatgtgtaactccatgtgccagcacttcaagctaaactaaagatcgaagagaactagtataaccattatagtttttatagcaacggggccggacgagctaacatctcacataacgagcgtgctgtcgctgccgatggaggcaacgtgagggacacgctcgttagggtcagtgccactcacaatgatgtcctcgcatgtcttcgacttcaggtcgtagtggacaggtgcatcttggcgtcgtcaccgtcatcgatgctctccgctgaccattacttgttgctcgaagcgacggagtcgggcacgatgtcaccaaagttttggctcgcatgaacactctactgccactacacgtgggccctagcaatttgcgatttcctgtaaccctcaccgatcacgagttcgcatacagggaagctaccggcacggtcttcctagaggtcagttactctgtcggtagcacgctcgacgcaatgtgctggttcaggaacaacaacaaattgaccaagtagcattctaatgcaggtgttaagagttcaaggcatcaatacgtagaaaaacttggttactttaaaaaaatacatttaaaaaaataatgtatcgtatggtaacttctacgacgactcctgcaagataaacacgagcgtcaagtttgaaaatacttctcaaaaggagttggtggtactgctagaacaccaacgagactaactgcgcaatctacaagtcttggacaagaccgtttaattcggagagtacatgcgtgtggcttcggctctcacctttagaggtatatacatgacaacggttgctccgttatactacgtagtacatgcgaccagtatgcagcaaagttatagtcgactcgttgtcgcgtgggcacacctgtacttgctcacagtcttccaaaatttaccgcagtggtgagcgttgaacgcgccaagcaaaactatgacactcgctagagatttaggagagagcatgatgcaacttcgcgccgacgacacgtactacgttgccgtaaggatcatcagcgtttgaaacaagctcgtccggccccgttgctataaaaactataatgggtatactagtcctcttcgatctttagtttagcttgaagtgctggcacatggagttacacatgcatatggttggcctgtttgtgtatgggagctccggaaatgggagctccggaaatgggagctccttagctgctccccaaaaagtcccaacttcatcacgtacattaactcgctttcatacagcactaagctccgctcacttcttggcctgcaaaatctcgatttgacgagtgagcgtgtccaggtacttgttgcagtcttcctgcgtcgtgaggggtgagcacatcaggtacagcacgttgccgagggaacgcgcgtacacgccgttcttgcgcagcacttggatgagctcggcagcctccgtggacgcgtagccggcgttctctgacgccagctccacacacgccacagtaccgatagcgaacgtgcgcgcgatgtacggccgggtagagagctcggtgagggcgtccacgttccagtacgcacgcgtagcatccttggtaggagcgctggcgttgttgaaaatctggtacatgtctagcgcagtcacggcggcagcacaacccatcgggtacgccgtgaaggagtggccgtgcagcagagcctcgcccttggagtccgcgtagaaagtgtcgaaaacttcctccgaagcgagcgtagcagccatgggaaccacgccaccagtgagcagcttggcgtaacacgcaatgtcagggtcgacgccgagcaggtcacgcgcagactcgactccgagacgccaccaaccggagaacacctcgtcgtaaatcaccgggatcttgcgcgcgcggcactcctgcaccagcatgcgctggtacagcgggtcaaccaggaacatgccaccggagcccatgagcacaggttcaatgagcgcagagcccacacgaacgttcttctcctcggtcgagtcgatcatgtgagccacatgcttgcggtacacatcagcgagaggactctggtcgcgagaagcgtcgaatgcagcgttgagggacggcagtttttcctccgtcggcgtgttgccagcgatctcagggtcgatagagatcacgtactcgccgttgcgcagtgccatcatcgggaccttcaggaaaacgccttcaggacggtaccacgggtgctgcttctcgttgaagacgctcttctccgcgacgttcatcacgcccagagtatcgccgtggtagcagttggcctgggccagcgtgaccatcttggaccccgtagcctcatccgacatgaactcgctgtactccagcttgtggtcaagcacgtacttgcggaacgccatcttcagcgccacctccacggcggttgatccatcatccgagaagtacacgcgcgaggcccagcccttgccgacggaagccaggagtttctcactcagctgcaacgcgggctcgtgggcgttctctgggaacatgacgtggccatagcggccagcagcgtacgccagcgccgtggccatcttcgagttgccgtgcccgacaccctgcgtccaccaactggcacacgcatcgaacagcggttcgacgctgttgctgtccgggcggtatacgctgaactcgtctccatgagccgagtcgatcatggacagcccgcccgccttcttgtgctgcgtgaacggccaccagaagacttgctccgcgcgctcttccatgcgcttgaagctctccagccgcgtctggtggaacgccttgagcgccttgttgacgccagcaaacaccttctcgtgctcgtcgaaccacttgtccaggggctcgggcatcggtggaacggcgctcatggtgaagatggggatgccgagctcactggtgcgcggctcgagcgccgccgcgttgtcgagtccgtcctgctcaatgaggcagatcgcagccacgtcgtatccgcggatcagcagcgtctcgagcgccgacatggtcgtggagatgcctccgagcttgccgtcgcccaccagcaccacgggcagacgcatgccgcggtagacgtccacctggaacctcatggaggccgaggggctgcacactccgcccgccgtctccacgagcacgaggctgtccgcagccttatcgccgttcacgccgttgatggccttgagcttgtccgcgagcagctgcagcagcgcctcgtccgtgatggtgtggccctccatctgcgccgcgaggtgcggcgacaccgggttcttccacgagaagagcgtcgagcactcgagcgcgccctgggacttgtcctcgagcagcgcgtgcttctggacgaaggacgcgtcgccggggaaggagccggggatgtcgtcgtccgtgcccgtctgcagcggcttgatgtactccacgcggcccccgctcgtggccgcgatggtggcggcgctgcggcagatgccggcggacacgatggtcttgccgatgtccgtgttgctgccgaagacctggaacacgggcgtgtccaggctcagcgcggaggcgccttgggtgcgcagctgctgcttctgctgggccagcgcgtcggcgccgcgctgcgtctcgcgcacgcccacgtggtacttcatgacagcgctctggggcctgcgcagcgcggcggcgagcgggcggcggagcggcttggacagcatcaagactcggggggctggggggtatgcggcggattggcgactgaagctggtgatgcgtgtatgtcaatgacgttgattgcgcgccgaacctgcgagaaccggtggaagttgaagacgagtgtgcaggggaatgcgaggatagagggaaagtgcagatggttggtgtgcagtacacaaagttaaacgaagtggtacgaattcggagcaggtgatgcgcctggagcaccggcatgttgcagtgtgacgtcagcgcggtcggtgcaagcgaggcgcttgatgcacgagaggaacccgaacgaagcatttcatgtaagcttactggggcatatgcatgtaccatgataatgtattgagctcgaatttgtatgttttggagaactacgttgacgcgacctgctacagcacatgtaaggcaccttaccgctctcaagggcgacgttgaagcacggtaacgaggccgcgccctgctcatccaaaccgacagcagattctggtcgaggtaatcgtcctccatccaggaggctcagggtcgttgaagatttgtcgttgacgctaccgtacacacatgtactgctagtaagaatgaactcgatttaaagttgctgcagctagaaaaggaatatttaatatgcattgttcttgtcgggtcagcatgttggaactaagtcttccagaagcgaagctgattgaaacggatttgtttcggtatgcaatttcacgcgctcgttcgttgcgcagcagtcaactcaagttcatggggcgattcgcaccggcgttacattatttgtttgtgccgcagcaccgttgccgtcggctcgccatgcgcgagcctgaattcaaacaacgagtcaacagatgacttaagtctattttgttttgctacgacttcttgttagagctcacgcctttgctcatatatgtctacggtcacctaaacactaagtgataggaatctttaacttaacggggtgggctactccgcctactgttcctaccattccaatagtagcccatcgatttagtagaatttcagttagaccaagcagcatactccatatagagtaacttcccagtacaagccagggtgtgctgtttcatcgctccagaacgagtctcttgttatcttccagcagcctcagtgcccgcaaacacgcgtttgttgatccgagcaaaatgttggtgttgatggctgcctcagacgatcactcgtgtaagcagtaatcctcagtgctagcatgccgcgatacgctaacattgcagatgaaacccccatctcaaggtttgacctcaaacgagtcggtattcattcatcaatacgaatgaactttatcccagctagtgttggcgatagtggagagctcgatatggacgagctcgacttggatgtggacccggatttagttgctttcctcgaggagttcgacgggatgcaagatgctaccgccgttcaaactcgaccagcgatgccaacctctgtgcccaacactgcaattctcgctaaccgcagcgataccaggaagttcaaggttttcgctccatctttaaagaggaaatcgtggagccagcgacaaaaggaggaaatgctgcgcttacgcgaagagctaatcacactttcagcaatagtgcggtcgaagaattctacaccggtgacaatgtatcaagataaaactcggtcatcttggaagaccgctgcggtgctggagtttcaacgattacagaccagcatgaacgaaggcgcaaaactgcgtgagtcagtcaaacgctgcaaggtggaggccgaacgcattcaaaatgcgtttacgaagaattttgccccctttgctccctgtgatcagcgacgttgcaacacctcgatcagcctccccattgacagccgccactggcgtccagtgcatagtacactggtgaaagaactggacgatgtatatgctgatctcggcagctttttcgagcggatcaagatgcacaaggctcaaccttgtggggcttcagcaaagcagccacaaagccgcatatttgtcgaggtgttcaacaactatgtcgtaccgttcgaccttcaaaaaacagagaaggtggtctgggcgcttaaaactgcccacctcagcactccgaatacgatggtgtccgaggtaagttattaaaatctccttaccgttctcgatatgatttttttttactgaaaaccactattttagcaatgtgaaacaggagagggcaccaatacgagaaggctcatgatctccatcgcacgtcacggagttgaaatgtctgttcaagtacacatcgctgttcgacgatacatcgaggaagaccgaacagtgttcatttctcgtatgcaagtggagccgctccacggatcactcatcgcagcatgccgtgagaccacgcgcctagtactggagcacggtggaacagcgtgtggagcaacaacgatattgcgaacacattgccagatttcagatctcgacagaccctcacaccatgacaacttgccagacccgagtttagttccagcatcatgttaccaaaggtgggttcgagcgtgggagaaatcgatttccgacttcaaccatcgagtagaggatgcactgttcgttgaatcactacgaagtactacatagtgtcacacatgagtcgggcattttgttgccgttccgtactccatcctgccacagtgtagaaggtgccacaagttagcgaataaattctttttcggacaactggtttctagaactcgcagttattaatttgtctacccaagttatctggagtccgtgctagtggaattttacatcctcacttcttagctggaagcggagcaaacttttgccgactatgacggcgaagacacttggttccgcagtacgtgaacgtgaacttggtgaagtattctccctcgatcggctcgaagtagttctcgcagatggaacactgcaggtagtttttcgggattggtggggcctctggaggcacgtaccaggccagtaagttcacaacattggctctcacaatctcgtcccattgaatttcagcgacgccttgacgtaggagacggtgcttaaacttttcaaagaggtatgtgtatccccctccaccatagcggcgatactggatccgctgataaacgttggttgagaggagaatctgcgaaacatatcttgactcgcttacgaggcttgcaatccactttacaaggcggctatcaggtggaggttcgtgagtttcttggtcagaagcttctccagcgctcaacactgccgtcaaggtcgggttgaccagcaccacgtcactcacagccagcaggccaacgagatcaaacaagaccgagacacccaatccaagcaactcgagcagaaacgcataaccagctccttgaacgtctcctcgacaccagcgatcagcgtgacaaacgactagcttcttgctctccgcacctgcatccagtagattccgaatccaagttcgaatcgcctgctcaagctcagcacttcccgcagcctcgtcaatggaaaacgacagatacagcggcgcatgggtccgtgcttgggccaacgcgagtccctgcaccagaatctcctccttcgccgtaagtagccccccactcttcacgtggatctgctggtacatggccccggggaacgccaccactcccgcaccctcaataccgaacaccagctcggcctccagcgtcttggcaacgcgttcactctgttcttggggcgacaacccgatacaaaacttctcattgagcttctccacctcgaacgtcgcgaccgtcagtagatgcaggtccttcaacctctcggccaatcgcagccgctctttcaccagtgcatcgcgtccttcagtcggcagcgtgacgtccaccaccaacggcttgagcttgtggagcttatgttgctgcagcctttcgagctctcggaacgcctcgtcctccttctggagcagcaggttgcgccccccatgggcgaaaggcgcgcgacggaagtccatcaagtcttccatgcggatctccaggtccccattggttgcagctacagccccgatgttgtgcagcacatggtcgtgggggagggcgacccccacgtcctcaggggccacgagctcccgcacgctgcggatcattttagctacaggagaccgaaaatagcgctaagtacgattcgaccagtgtaacggatgctattcatggctgcactttttgcttgctggtgcaaaatgcgttcatttcatttgccagcttgaagtgaagcgaagcgaagcaagcagtgtagccatgaacaacctgttcaaccgcaacaagaccttccggccgcaaaagagccacagccacggcaccaagcgctacgacctgcacaagcaagctcaggccacgttgggcaagtacgtaccgtaccatcactctcgttgttgaagttgtagttgcctttttcaaagtgtgtaaccttttggatgttgttttgtgactagtggggatatgaggaatgctgtggcgctgcccgagggggaagacctgaacgaatggctcgctgtccacagtacgttcaaccgatcaacggttcggctaaaagtgtgtgctgaccaatgtgttcctcttcgtgactttcagcggtggacttcttcaatgagatcagcatcatctacggcacgatcctcgagttctgcacgtgcgcgtcttgccccgagatgcgcgctgggcccaagttcgagtacttgtggaaggacggcaaggagtacaagacgccggtgaagctcgccgcccccgagtacatcgacatgctcatgacatgggtcgaggagctgctcagcgacgaagcgctcttcccgactcgagagggagctccgtactgccgcggcttccagtctgtggtcaagaacatcttccgccgcctcttccgggtctacgcgcacgtgtactactcgcacttcgacaagatcgtcagcatcggcgctgaggcccatctgaactcgtgcttcaagcacttcatagcgttcgtcacgcagttcgacctcgtggacaaaagagagcaggaaccgctcaacgagctcatcaagaagctactcaactagatgacacacaacacacaaaacaatcagagagacctcaccttattagctagccgacttgttaggtattacttagactctacctaaccaccagcctcccacgaatgcaactacgaacctcttctcctaaacataaataacgcactgcttcatgcacgcagagcagtcacccgctggacctgtacccgacttgttccctctaaagacccagcagatccacttgcggctgcgactggttgccactctgctccttctggacgaagccagcgtgcgtggcagggttgaacggatcgaagccatcgtatccactctgctgcggcttctttacaggcgacgagtgtaccgcatcgtctgaaaagtcaatcagattcacttccggcacttcctgaactgattgcagcggctgcttcatgggcacaagctgcggcgcgtgttcgtgctcgctctctggctcctcattagcctcctccttaatcgatgtgataacgtgcatgtcgtggatcaggtcctccagcccctgcgagccgggcgacacctgctcgaaatgctgcagcggacgggtcgcgttcacgtcctctcggtccacaatgggcttctcccactgcgtgctgcccgtgccctcatgacggaagtacacggcgctcctcgagcgcgagtagaccgggtaccaccccgactccagcacgaagttggtctgactgatgtcgctccacgcgctgccgtcaatgaacaagtcgtacgtcttcctgttgtcgtctgtgagagccaccaccaggtccagctcgtgctggtcctcgacgtcgtactcgaactcccacatctcgccctcaatgtcgtcaaagctcacgcgcttgagctctctgcagtccagcacgaccacgaactcgcccttctccaggtcccgcagctccagcttgtggatgccgccgctcactccgaacgcgaacgtccaggtcagcagcgtgcccgggggacgctggtccccgtcactgagcagctccccgctcgtgtcctccacgcgacgcacgtacatgtcgctgctccagaccgacgccgtgtggtggcggtgcgccacgggcaggaacctctcgcccagctggtcccagctcacgccctccgccacgaggtcgtagaccgtctcgagccgccgctggtccacgaccgaggacttgacgtcgcggatcgtcacgcggaagggcgtgagcgcgtcgccgccgcccacgtggaagtcgtagtgccagttggtggcgtacgcgtccgagctgtagagccggcggccgtccagcttgagccgcttcttggccgagatgcggctatgctccagcatgaccgtgtgcacctgctccgatcccgcgagcacgaagcgccacgtcacgcgcttcttggacatgggcacgcgcgcgccgatgttctcgagctcgcgggacacgcggagcacggagctgctggtgctgcccccgccgctggtggaggacgccgtggagtccatgctgccgcgcgcgcgccgcggcttgggcacgtagctggcgtggtcgctgccgctgctgccgcgcgctgggaaggtcggcgacgagagcgtcattgagagagtgcttgatgaagccactggaccggaaggccgaatgccggccgatttgtatggagatctcgctgaaaggagaaggaaaagctggttcctcccatgcgacagctgtgccggaaatatggtacatcatggatttctgaccaatgagcgaattttgaggttgattttcagcgaatgaagaggggataggggaaggggtaccaggtgggttgcacacatggctacattttgcgtggggtggtcaagtatgtagcagtgcatactgcaaccgctggagtctacccgaatggtcaacatgcgaggctctgtatgtatctaggggtggatttccacgttggtcgagtacacttcgctcagctccttgccctgcaccacgttggtcatccaggccgtaagctcatcggccaagaagctggctttggtcttctgcacgttgtggccgccgcgctcgaaggccagacgcggcccggggtggcacactgcgctcacgtccaggaagatttcctcctcgatgagcgcgtcgtccttggcccacgcgaggaaactgggcagcgaccggttcttctccaaatgctgggcgaacagagggaagtcggccgtggcgcagcgcacgatgcccgcagtgaagtagtcgggcagtttgctgtccgggaacttgaacgatttgatgtagagctggcggacgagccacttggacacgccctccaccaccggcacgcccgaccgcagcatcttccacagcagatcgttcaatcgggggttcagcgcatgatgcggccggtggccggccccagcgagaagtaccagccccttgatgccgatctgctgctcgtccgcgttgatgcccgtgaaatgcacggccgcgtggccgccgaacgagtggccgagcacgaacacgttgtcgcagtccttgagcacgccctgcatggccttgtacgtgagctggacggaggggaatgcgctgatgtgctcgtagtagttggaagtgtccaaaatcgtcgagcctgcgaatccgggcaaattgacgccgacgacgcgcacgccgcggtccttcagcagcgggatgaggtggcggaagtctcgatatgtccctggcgcgccatggatcagcacgagcgtgggcgtcgtagccgtgagatcctcaggcttgacgtcgatgtactcaatcgtgcacttgccgtccacgtcgatgaacgttggctctggcagcggcggcggcgagtaccgacgagacttgccagcagaggtggactccgtcgcagtagagaacgatacgctggttgcaagggggtgagacgatggcctcaactgctgctgcgctcgaagcgagactgggaacctccggccgagagtcaaaacgctccgctgccttgcagttcttgcggccacgctaaccgccgccttcatgcttctccttggtctctgattcccgagtgacgcgcctgcaaggatgggagatatcggatagagtcccataggtggaagggctctcttcagaaatgcaacttcagctgtgcatagatccaaagtgtcgagtcgacatcacgtcggactcggcctgaccatcaccctcgcagtcgggcaatgctgcggcgcgttcctcgcgctcggttgctgtcgtctgcgtgcgcgcgcaagtcgtacagccgctgggacttcctgcctcgagtggaggtggcgccaccacgcgaagctcgagccccgccgccgcctcttccgtcgccaaagtatctggacatccgcggtcgatgcacactcgagtacgtcgacgtcccgccgctggaggaagctctgaggggccatgaggcttccgtgacgatcgtgctggtgcatggcgcaccgggcagctacaacgacttccgccacttaattcctgtgctggagcaccaccacccgcacttgaggatcattggcatcaacttaccaggctacgcaggctcgaaggtggcgaaggaacactatctagaggacattagcgcgctgccgactgccagtttggctctagaagcagtgaagcagctctacgcgggacaagaaggaagcgacaatgtgttcttggttggccactcctttggagcccacactgtgatcaacatggccgcgttgcatgcgactgagagcaaggacgtcaaggttcgagggatggcgttgctggcccctgctggttgtcggcctcacaaggtgttgaggcccagagagagcgcaatggtggtcaagttgatgcggacggggaaccccgtggttaatgcgttcatcccgcccttcatcaagttggtttacaccaggctactgggcttccccagtgacgcaccgtccggtcactacatcgccggtcttgtacgtgcaggaactaccgactttggagtgatccgagagcacgtggagatgctgcgcaggcagaagctgccgtcgcttgttgcgtggtcacagaacgatgagttcatggaggaagagatccctcttgagctcgcgcggctttgccatcccggcccgcgtcttgcatttgctggtggaggccacaacgtgcagaagacgcgagcagagcaagttgcgggggccttggccaagtggatcgaggacgtcttaggcgaagacggcgcaggggatcagcaattaactcaaagtttaccgtagctcgcctgatgtgcgatagcagggaataaactgcatgaacgattattcgtgtcgagtaaacctacgacggccgctatgaggaagccaggtgccttgaagcgaggcctctcacagcgtcacaatcaaagtctccgacaggcacccaacccaggacggtatggcgttgtggtggagtcgtgtcagctcagctggaactcgaatcctgtcactctcttcaggctgcttcgagtctgctgggcgtcaagattgtcacggcggttccaagtctttccccccaacgagtgagctcgtgagcatcgcgctgcacccccgccacttccagcgcccaagtatctggatatgaagaaggatcactgcagacttgaatacgtcgacgttcgctcacctgaacgcacccaagcgactctcgtgctggtcctcagtgcacccggcagctatcgagacttccgctacttgatcccgctgcttgttcaacaacctgggcttcgcatcattggcatcaacctccctggttacggttgatctatagtcaagaaagctcactatctcgaaacggtcgatgccattcgaaccgcagaggtggtgctggacgccattcgccacatttgcgaggatcgtggaggcgttttcttgatcggacactcctttggagcgcacaccgtcatcaacatggctgcattgaatgcaaccggtaccgagtcgaaaagcgtagcgaaggaagctctagccatccgcggactggcacttatcgccccggctggttgtgtcccgcatcaaagtctccacttgggcgccatatcactgatgctgaagctgttgaagtcggggaactcgtgggcagtgagcgcagcaacacacgtcaccaagttcgtgtacaccaaagtactgcgctttccaagcagcgactcgtccgccgatccgttcgtgtcggctgtggttcgagcgggcacaaccaatttcgacttgatccgtgaccaggccaagctgctagaaagactccgactgccgacgttcattgcgtgggccaaggacgacgagcacatccagccagagatcccgacagaattgtgcaagctgtgctctgttggcccacgacttgagttctcaggccacaacctgcaaaagactcgagcggaccaaatagcgaccgccatgaccaagtggatcgacgatgtcataaccaaaacctcagtttaggataaaactttacaaggccgtgctctgcccggaacagctctggattttacgtcgctcttgtgcatataaagttacagtgttattagttaggcattacgacgaaagcatcggccactggcagctacatgattagctatggcctgtggcaagagccattatgtccggcatcattagtgaagacccagaggtcatgcgactcaggcctcgtgcgcaggcagcttcagcaccggagccgtgagctgatgccgtctctcgagaacgcgttccagtaagttgatgagctcggtaccccgttcaactcgacaggaatcgtcaataatcgcggctacatctacgtagacggcatcgacatcgttaagatggtcaggggactgcagccaacggggtccaagagagccgtaccgcggacattaatggtagcgttcggcgtcgacatcagtgctgcattcagtgctgcaatgttgatcgcagtgtgtgcgccgaaggaaactgagtaccgatgagtattggcgggttctgttgttgccttgacggagggtcttcatactttttgtgcaccgtttactggaatggttatcaaaaattttggatactacttcgaagtatttttttttcatggaagtgctgactcatcccgagttcattagaactgcacccgcttaagatcgcggagatccacgagctcaagctagccgtaatctgctcgactcgagtcttctggatattgtgtcctccaccagcaaactcgagccgtgggccaacatgggagagtctgccgagctcttccggaatcgacggctcgaccagcacatcgtcacgagcccacgcgacgagcacaggcatgctggcttctttcagcatggtaacctgggctcgaatcaatgggaacttcgttgtgcccgccctgattattgctgctacgcaggatgtagccggcgtcctcctgggaaacccaagtatctcggtatacaaatacttgacgaaacgcgtcgccaggcgcacaacgactgcactgcgagatctcaagagaacaaccatcatcttgatcggtatttctttcaccattcgttgtggcacgcatcctgccggtgccatcagcgcaatgcctcggattttgagtacgttgacaggagccccagccattcgctgcgtctcgttcaatgatgcaatgttgatgaccgtgtgagctccaaacgagtggccaattaggaatatatcacctccgtcattatcgccagagatgcaaagctgtcgaatggcttgcagcaccacctcagcagctcggagagcgcaaactgtctcgaggtaacgaggtttctccacttctgagcccatgtagcccggaagattgactccgataattcgaagaccgggttgctgctcggcaagcatcgggataacgtatcgatagtcgcgaaaacttccaggagcgccgtgaacacacacgaccgtggctgaacaactgcttttgagttgagttggctcgacatcgacgtactcaatcttgcagacgccgtcgatttcgagatatttggggtctggaagtggcggaggcggcggacgaggctcatgcacgacccgtgatgacctacagcatggcatgagacacaacaagctcggtggagacatctcactgtacgattgtgaggaagggcgtcgtagcccgattgagcttagatcgatcgcatcaatcctgtttctcgctcttatccgtcactacgccaagaataaagtatcaatgtattgcgtcgcttcagtcgctaccatctagcattcgcgctctcccttgctatagtgtttggcttaagatcgcttgcttgacgcactggaacaacgcgcggtcctcgtcgtaagtcagtcgatccgcgacttggtccagtgacagccaacagaaatctgagatctcttcggtttgggtttgctgagccattggatctcggactctcgcgacgtagaaatcgacgcatttgttgatcttcctgttgcgcttgcagaagctgtactcctcgcggaacatcctgggtcgggtcgcgtcttggggcgtgatacggtcgatgtaaccttccttctcctcatcggcactatgctcgttgaagaacacatccgtggtattgcgatactccccccaagactcgtgctccatccacaccatggggacatagagttgggtctcttcgggtgtgaatgtccgatctgtcggcgtctttcttgtgccccttgcagaacgaccagtgctggccattgcgatgctgcagtagcagagccttgtcttcacggtccagcacgataatcccccacgagtggtcgaaggcactgcgctggctgcgcgacctccatggagcgagcgctcatggtggtgacttgttagcgatctatcgcgctaaatacgaaactattggatggtcaacctgtacatcaactcgagttttgttctctggattttatccagagtccatgggtgaggtgccattattctcacatcaaatacctgctacatatgggtttgagcgctgctgatgttgatagctaaaatacctgttatactggatagcctgcaatctaatcaaattatgctgctatgttgacccatccggttgagattaagtcaaattacctattattttgcataccctttaatcaagtatatatacctgtgatagatagtttatccgccactcaagcgacatccatcggattccgacgggatcccgccccggttgctagaggggcattgcttcggaaaatgttgtatcttcagcaccgccaagtatcctatacacactcatacttttaccaaattggtttcaaaaatatatgcacgaagtgccgggtttgcatcgcgttcctatcaactggaatggtgaaaactgggaatactacacggcgctgatggtgagctgcttcgaggagaaggacctcgagctgatggccttcggggagaagactctgaaggaggatgctgacgacaaggcgcgctcggagtggaagcagaagcagacacagatcaagtggatggtgctgggttctgtgtcgcctgccttggcgcaaagggtgatgaagaagaagacgggcacagatatgtggaaggcgttgctggaatattacgaggctcccagtaaccaggtgctggctgtacacaagcagcgccagcttttgcataagctgtggcacacccgagcaggcaagggcgaagatatgatgttacatatcggcaaaatgatggatatcagggatcagctcacggcgctgaagtataccgttcacgacgtcgacatggtcgacgctttgctgaatagtttgccccagaatgacaagtaccagcaattgacacaaatggtgcgctttggtattggaggtcagtcaaagcccgaggaagttcgtgatttgattttggtggcagaagcacagcttaaggatgaagctggtggtgtgcttggcgctcgtgggactgctagtggtaatggcaagtctggtaatggtaaagagcagcatggaagttcggcgaagaagtggaaaaagaaggagcaggacaggtcgcagattgagtgccatcactgccatcaatttgggcacattaggcgtttttgtcctgagctggagttgtgcaagttgaaagtggcaggcagtagcagaagcaacacggccagaaccagcacaaggctggaggtggaggtgcaacgaagcagggtgtgagttgcgcggtggtacccgtgctcacagctccagttgtgtcggaggtagacgttctacctgaccgccaagagctggaggatgactatgactctggattgtggcactatgatacgttgtcaagtgcacacatcgtaggcacgatggagtatttcgtggcctatgagtgatggatccgtgtcgtgggtttgcacaaaatatgctgacacatgcagtcggtgttggtgtagctgaactagtaacgaagtcggaaaatggcgagctgcaaaagtttactttggatcgagtgctgtatgttccgagcgctcgatggaatatgttttcggcaggaattgcgagagaccagggtctcacagaggtgcaggatccggtttcgggcgcgtacaacatgtatgatggtgataggttcctgttggctgcaacgctgcagccgaccaacgtgtggagcttccgtagttacaactcgtttacggaggatggctctcggcaggcgacgcgcgctgctgaagtcgtgaacttcacaacgatggatgggctagctcacattcgtgtttggcacaaatgctcaatacctaagtcaatgtctgataagagcatcgttgacggtatgatgctgaagggacgagagttacccatgtgtgagacttgtcagttagcgaagcagaagcgtaagaagcgcatgaactcgctggaccgtggtattagtgaccctaacgatgagattttcgttgaattgatggaccctggcaagcacaacaagacacgattcaatcaggtactcgtggttattgatggattctcacggttgattcgtacctttcctctcaaggacaagaaggagactaatgagaagctggagcagtatatcgcgtgggcggagcgccagctggaccgcaaagtgaagcgtgtggtctttgacgatggtggagcatttgcaaacgacagtgaaggcctggtgcgcacagataggcatcgagtatgaagaacttgctcctgatgcgtcgtcgttgaatttggcagagcgtgcgatacagtcactgcgtggtatgatgaagtcgatgctggttgcgtctggattgcccagcagtctctggcccgatgcgctggagaacacgacgtacgtgaagaaccgcgttttgtgcagaagtattgcgtctcggacgccgtacgtttgtttttcggtaagcggcctgatattcaccacatcagaacgtttggtgcactggcgtatgcgcacattcctctcaagctgcgggagaaaatggcgaacaattgcgaggtcggatactcgctgggttacgcagaggatcgcgtaggtacgaaggtctacttcccgcagtgcacgtgtggtgttcgatgttcgagtgaatgaagctattttgtatcgagatcgagcagaagtttcaccttcaatcatttctcgtttggccgaagtgaactcggatgctgaatctggctctgaagataaagatagttacgctgaagatgatgctgattcgccgcagaggtcgacggcggtatggaggccgctgcaccgacctggtccgggtggatttcgtgtgcatttacgctctgcagtgccaaaggcaagtgatattgcggatggcgaggatgaaagtgcccatgatagcgctgacagtgacgttgacggcgatgtcgacgacgtgagtagtgcgtctgatggctcggaagctgcaaatgatccagattctagcagtacaagttcgagtgagcacactgtgcagagcgaatcagactctggaagtgattctgaggtgcagagtgataatgatgatgatccgagtgcgattattgagagtggtggtggtcaaaatgatgtttatgacgaccatgatagcgatgatcacgagaatgaagccacgcccattgagattgagacgtacgaactggcagaaacagaggagcagcgtgtagctcacgagacagctgaattggatcagttgtgtctttggtgccagtgccggcgcaaaattcgaagcgcaagaatcgtggtcaagaactggacaagcgcagtcggcgcaatgatgaagataagagacctctctacgatccccgtaagcgaaagcggccaaaatacctcgatggctatgtggttaactccacattgctgtttgtgagctcgatgttgcgaaggtggcgtgagagggacgtaaaaatacctctcacatttcggcaagcaatgaggtcgaagcaagctcgtgaatggctggcagttatgatgagggaggtggaggtactgcgcgcacaaggtgttctcaaggagagcgatgcactgcccgggggacagcacttcattacggctaagtgggtctttgacgtgaaagtggacgagatggggtatgtgatcagatttcgtgctagactgatggcgagaggatttcgacaaattgcaggtgttgatttcgatgacacattttctactgttgctcgtctgccgtctttcaggttgctgttgtcctttgcagttcatttggactggcaggtgtggcagggtggcattaataatgcctacctcaatgcagctctgaagatcaagcagtatatcaaggatattgaggggtttcctagtggagcaggcttgtacgaagtaaacaaggccttgtatggtttacgagctggacaagtggttcaaagctcatgggttcatccagtgtaagtcggagccgtgtctgtatttctacagcaaggatggcacgatggcatttgtcttggtgtgtgtgggtgatttgctgtgtgcatccaactccgaggagttcaagtgcagtctcttcaatgatttgggagaggactatggcattaaggatttggggctcctgcatcagtacttgggtatatgtgttcgccagaagcctggtgaaattacgatcgaccagcagcaccatgctgagaagttgctggagcggtttggtttgagcaaggagtcgaatagcagtgcgattccgatggagacgacgcagcgtcttgaagcgtgtgagcagaaaagttcgtagtgtaagaacaacctggatcagatggcttatcgtgaagtcgtggggtgcttaatgtacttggtaaccagcactcggccagatctgatgtatgcagtcggtcaattaagtcggtatgttgaccatcctacggagaagcacgtcggagctgcaaagagggtgcttcgctacgttttggatacgactagcaagggcatcacttatcgcaagtcggatcgatgcgatattggagtacatttggatggctactcggatagtgactggggaaatgaccgtgattccaggaagagcacaactgggtttgtcttcactctaggaggtggcgcgatctcgtgggcgtcgcggcgacaaacaattgtggctcaatctactgcagaggctgagtatgttgcagcttgtgaagctgagatggagggcagagcactgatgaatatttggacgagtagatgaaaagcaaactgacacttggtgtcgacaatcaatcatcgtttgtaatggctacaagtccgaccttcagtcgacagacccgtcacattgagttgaagtgacagttcgttcgtgagcaggttgaaaagtagcatttgtacctgtggaaagtccgaagtgaggacaatcctgcggatttgttcaccaagccattggcgaaggctcggttcgagagtctgtcgtggaatgcgagtcatcgagtgactcagcgtgtaccagcatgcttctgtgaggtcaaagttgttctctttgagaggggtgtgttgaaatatgggtgacgctggactccagcggctggagcatcgacgagctggctagcgctgtgagatcttgtgcaaggggtcgtggcctttgcagtatccacgtacactagggcctgctgctcaagtatgggcccacgctagcataccgagcaagagctgcgcgaggccgaggtgacgtttgtggcgcagtacgtcatgaagtccgcctacatcgtggagctgcacgacaaagtgcacgactgttgaaatgtgaaagcaagctagcgagcgtccacgctcagcacaagggacgaacaacaacaggaattcacgacactaaacgacacttgttatatactgggcagattcgagactgaggctcagtctcgatctcccttgcctatcctactaacagatactgctgccagcgactctctgcagctctccgtagccgcacgagctttaggtcggagcgaagacaactcaatagagagcacgcccaagtcttcgttgaatgcggggacgcgcgcccttggcgcttgtaggtcatggcctcacctctctcggcatgcccgtctagaatttttttttcaaaaaaaataataacaggtagtgtcttataagtcgctgtcatcctagcaacttcacccccgcgattatcagcgtatcctgcagcttcaatcctagctagccctaaatatacttcccagattggggggtatcatctggattttatccagagtccatcacatcaaatacctgctacatatgggtttgagcgctgctgatgttgatagctaaaatacctgttatactggatagcctgcgatctaatcaaattgtgctgctatgctgacccatccggttgagatgaagtcaaattacctattattttacatacccgttaatcaagtatatatacctgtgatagatagtttatctgccactcaagcgacatccatcggatttttttcgctccaacaacatgccgacgggatcccgccttcaacggtgacgacttattagttaggcattacgacgaaagcatcggccactggcagctacatgattagctatggcctgtggcaagagccattatgtccggcatcattagtgaagacccagaggtcatgcgactcaggcctcgtgcgcaggcagcttcagcaccggagccgtgagctgatgccgtctctcgagaacgcgttccagtaagttgatgagctcggtaccccgttcaactcgacaggaatcgtcaataatcgcggctacatctacgtagacgacatcaacatcgttaagatcgtcggggtcggctagcttgctacaatcccaaacttcccgtgtgttatgttgtaaatcagtttctccttactaatagcggtgcaaattctgggcagatgctgcggctgcgaagcaggctcaggagatgcccttgggtcgtacgggtcacactataccgaagtataaccaaatgattttttgtaccttcctagtcagtatcaaacggtcttaattcgtgcacttgatcggtcggctggaagtacatattccatcttactcagttagcgatctccttactgcatgatcaccattaacgttgcccagctgattgaattcacgttgagcaggttgtgctttattatggacgatgatatggcggataagagaatcagtaagcattggtttgagtgatattttagttttttttcggcaactgtcgggtagttaaataagctatgtatgtgcaacggctttctgaaaaacaaaatactgtcatttacctatcctagcctacgtgaagccctagtaccgcagcagtacgtccggtaatcaacacctctagctctgtgaatacttggtcgtttcgcttgtggctaaatggagagactatgttgtgccttcgtcctattatttcaaattgcacttaaaaatgtcagaactgaagcacttcaaaaatgcactaccagcccaaacctctagtgaattcaagaacggccactattcgtatgaatccgttaattcaactaatagtggccaataccaaatctctactcctttctgccattggcacgtagaaacaagatgcagcagtacactaacttatatgcccaagagcgacgtaaaatccagagctgttccgggcagagcatggccttgttgaagagcattgtgaagttagaacacgtaagaaatatcgttttgtcaagcaaaaaccttatctccgaatgttcctaaagtaatactgtgagtttgcatgcagttttcggcgtccctctctttacttacttcgcgtccacgaacctgaagtttatgcttttctttctcacgcggtactgacatgggctaggttaggtcgctatacagagggcctgggacaggtgctcggccgtggtgtcccttcgcccaaccaggaaaacaaaccaagctaaccagagtgcgaatggtgtcggtgtgtggtaaaaaacgttaaatagaattccacgacgcttttttgtcgagtcaacgtcacgacctgcaacttcaaatccggcagcttgaagctctcgtttgacaaggcataaaccaatcggccatccagcgcgcaccccagacatcgatcgagtatggcgacgacgcagcagcaggagaaggtagtgcgcagctacgtgcactccgggtgcatctacgtggcggagatgcgccgcccccgcgccaagaacgccttcaacgacgcgctgtaccagcagctgacggcagcactggacgagttcgaggccgacgactcgctgcaggccttcgtgctcaccggccacggcgactacttcaccagcggcgcggacgtgaaggagacggccgccatcctgggcgacggcaccatccgcccgccctccaagagcccgtcgcacgccttcatgcacaagatgctggactgcaagaagctgctggtggcggccgtcaatggcccggccatcggcatcggcgtgacgctgctcatgcactgcgacctcgtgtacgcagcggacagcgccacgttatggacgccgttcctgcgcatcggcgtcgtgccggagttcgcgtcgtcctacacgttcccgcatctgctgggccccaccgtggcgaacaacctggtgatccgctccaaggtgtacaaggcccaggaggcgctggacgccaagattgtgggcgaggttttccccacgaacggcttcctggagacggtgctcgcggagctgacgccgctggtgacgaaccgcttcaaccgcaccagtcttcctgtgtacaagtcgctgctgcgccgtgaacgcgcaccgaagatccgcgaggcgctgttctacgagttcgagcagctggaccggcgcgcggcgtctggtgagttcctggcgaccgtgatggagctcaagaagcagttcaagactaaaagcgccagcaagttgtaagttgccagcggagttcactcgatagttggctataaccgaagtgacacgagctgtgtggtacaaaactgtttgactgtcgtagataatgggcatgctaatctgccaacgcgataattccgcttgactcgtagcaatgaatcagttgcagcttcttgagctcgtcaattgctcgattgccttcttcaaaacttggacagctctgtgggaataaacgaatgacatcgtatcgttagaaatgaagtggtagctggaacgagcatacgtcaacacttcgtacattgaggaacgccttcaggtcgaccgttttacgcggtgtaggcggcaattcagttgacggcgtcgaaggtgaatcgttgcaaagttgttggtatagtcgagtcatgagcgttccgatgcccggggaaggcgcaagtgtccgcaacaaggagtgcaggcgaacactgttggaggtgatttggggcgtgaggtcttcgaccatgctcttgagctgcagcatccaaatatcagagggtagaacaatcgcgttaagaccaaggacaagagcattaaaagtctcgataatacgtacatgggccgtctcttccagcacttcttgcttctcctcttcgtattgagccttcaatgattgtttctacgcagatacaaaccagacaccaggtattcagcattataagccccaacaagaacgagcccagtagcagcaacaaacatgccccaacttacatcgatcttctccttaatcgcgtcttgggcttctttcagcagcacgatttcctgttcgagatcgacaatctcgttctgcgcgcgctcctcttcaagtcgccgtcgttcctctgggctctgctcctcctccatagtattctcgttatctcggttctcgttgtccttttccagcgtagcaaacacttcctgcagttgccggatctccgacgtaaagtcatccagctgcaccttcagctgcgcttcaaggtgctgcttcttgctggccttcttctgtagagcctcctcccgacgccgcttagctctttcagccttcatgtccctctccttggcgatctcctggtccaacgactccgtctggtcgtccagttccttcagcatgcgcgcgtactcctcctggatgtctgtatttctgctcttgaccaggtcccggaactgcaacaaaggcacactcaaatgtcagcactcacgacgcttaaatacgcagcagaatgggtacagttcagcgagacgtacgctctcggactgacgccgcagctccttctcgaggcgggccttggtgatctccagccgctccgtcgcctccgtcccttggtcgtagacctcctggaacttgtcctccagcgtgagcttctcgctctccgggttggccggcaccaccgccagcttggacgtcagcagcggcatcccggacgccggcaggtcctgctgcatgcgccccacgaacttgcccagcagcgcgtccgtcgagcggagctgcacacgcaacggaaagcagggcagacgtcagtacgcagcaggagcataaacagccgtagtataggaacaagcagaccttgtcgctgcatgccgccagttgcagcacgcacttgagcagctcgccgtgcacgtccgtcattgtcggcgagagttttgacttgccttcagtaaagagctagtttgggtcgtgtacactatttggtgttcgacacgcaacatttattttgccttgtcaaagcagcgcaagatgcagcagcgtccgccgccgcctcgctggtctccgcccgtgccccaggcgcaatggatgccaccccgccctgcgtttgtgccgccatttcctccgcctgctcgtggagttctgggagcaccgcgcttctatccgccgcctccgcgccctccacgcggctacttccctcgcttcgtgcctcctcctcgtcctccgcctccacgtcctccagtcgcggacccagagcagatctggctggagggatttaggcagacacattgcaactcggtcgacactaagaaggccgatgtagatggagttgacgagcctccactgcgattgctacgacgccgagtagcgcgggctcagaagttggcggaacagctgaaagtggccgcagcggaattggctggcgtggagaagcgacttgtgtcattgagtacagactacgaggaaggtcgtcgagctggtacgagcttagacgcagcctcgaatgtggaggtggctcggctgagagtgcaaagggaacggaaactggccgtttgccagtcactgaaaaaggaactcgaagcgatgaacgcgtcctcaggtctcttctctgagcaacagcttgcagtgatacggccatttgctgcaagagtcaacaagaaaaaggtgcgtagtcatcgggctcgatttccacagatagacgtattgacgttgtggaagctgacggatgctggggtggttgtgtgtaggtttatcgaaagcgagctaagcagcagcgccgtgctgaagcaagcatccgtcgagctgtgggctcgagcaagagcaaggacgacggcgcggtactggacaacgaaagcgagcaaatgcctgatactgctttaaaacgtccggaagttaggcaagacgttcaacaggcagaggcggattccaggaagcagcatcaagagacctacttatccgaatcaccacgcactccaaaccagtctctcgacccagagaccttaacaatcgacacattgatcgccgttcgacgagcctgggactcctacatcgttttaccacagactcctggcgcatgtacgattcccccggtacgcaatgttatgcctaccatgccatgctgcccattattaactcccttgtgctttcaatcaacagcattttgtccctcctccacctgcgccctctcctcaatggtcaatttatgccaccccgagtgcaaaggcaaatgtttgctagcccagttcatgcttaagtgtgatgataccaagcaaatgcttcattttacttatccttcccagcactctcttcttcgtacatgcaacctactacgatgcttagatgcaggctggataaacttactcctcgtcgtcgccggtctcgtcgatctccacgaggaggtcgccaccaagcatattgtcgccaacgtcggcgtggatcgacaccacacggccgctcacgggggcagccacaacggtctccatcttcatagcactcagcacaagcagggcatcgccagccttgacgttctcgcccttcttcacacgaacatcgagcacgacacccggcatcggggcgccgacagagccagccatgcccgtagccttcggcttggccaccgtcgacacaccagcagcctcatccttgaccttgatgacacgctggcgaccgttgagctcgaagatgatatcgcgcaggccatccttcttgctcacgccaccaacagcaatcagcttgatgaacactgtcttgccatgctccatctcgagctcgacctccgtgtccacctccaagcccgtcaggaacgtgcgcgtgtccaggaagtgcatcgagccgtactcgtccttgaacttcatgaagcccgcgaagacgtccgggtagatagcgtgcgaaatcacatccacgtcgcggatcttgtccgcgccgtacttctccttcagctccttctcagcagcctcgaagtcgtacggctccatctccgcaccaggacggccctcgaacatctcgtggccgttcggcagcaccttgcccttcagcacacgcgagcgcagcggctccgggaagccatggtgcgggatacccaggtagccctggaagtactccacgaccgacttggggaacgatagcgtctcagcctggtcgatcacctcctgctccgtcaacttgttctgcacgatgaactgggcgaagtcacccaccaccttggaggaaggcgtcaccttgatgatgtctcccagaagacggttagcggtagcgtaagcgcgcttgatcgcgggccactggcccgcaagaccgagctgcttcgactggaagagcaggttcgtgtactggccgccgggcatctcgtggttgtagacatcggccgaaccagacttctggccagactcgaacggcgcgtacacgccacgcatcgtctcccagtagtcgttgatctccatgatgtcctcggacttgacacgggtgtcgtacttggagcccttcagcgccgcgacaaccgcacccatcgagggctgcgacgtcgtacccgacatagcgtccgaagcaacatcgacagcatccgcaccagcgtacgcggcctcaagcaacgagctcacgcccgtaccagccgtgtcgtgggtgtgcacgtggatcggcaggtccgggaactcgttgcgaatggcggagataaggatctgcgcagcctggggcttgagcaggccagccatatccttgatggcaagaacgtggatgccctgcgccaccagctgacgcacgaagtccaggtagtactcgaggttgtacgggccacgcgtggggtccgaaacatcgccagtgtagcacatcgcagcctcaatgataccgccagcagcaccaacggcgtcgatacccagcttcatgttctccaggtagttcagcgagtcgaacacacggaaaacatccatgcccgtagcctgggccttctcacagaacttgtacacaacgttgtccgggtagctcgtgtagccgacggcgttggcaccacggagcagcatctggaacggaatgtcgggcacagcctcacgaagaagagcgagacggtcccaagggtcctcgcgcaggaagcgcatggatacatcgaaagtggcaccgccccacatctcgagcgagaaagcgtcacgcatggcgatggaagtagcaggagcaatagcgagcatgtcacgcgtgcgcatacgggtagcaagcagcgactggtgcgcatcgcgccaagtggtgtcggtcaggagtagacccttcttggcacgcaccgccttggcaaacgcctccggaccctgctcgacgtagatctggcgcagagacttctcggtggaagcaggaggagcctccagggtaggaacgagggggtcaaccttggacggagcggggccagtggcacccagcgccttctcggggccgttcacgatcgtgttaccgatgtacttgagcatcttctggccacggttggtcgacttggacggcagcagcaggtccgggttcttggcgatgaagctcgtgtccacaacacccttgatgaagtccgggtggttcagcacgttggtcaggaagctcttgttggtggtcacaccacgcacacggaactcggacagcgcgcgcttcaacttgtgcgcacagtcaccgcggtccagagcacgggcggtcaccttgaccagcagggagtcgtagtgaggagtgatgtgagcgccgacgaatccagggccgtcatcgagacggatgcccatgccaccggggctacggaacacctcaatgacacctgagtcgggctggaagcccgtgctcggattctccgtggtcacgcggcactgcatcgcatggccacgcggcttgatcttgtcctggctgagaccaaggtcctcgaaggtctcgccaccggcgatacggatctggctctgcaccaggtcgatgccggtgatctcctccgtgatcgtgtgctcgacctggatacgcgggttcacttcaatgaagtagtggcggccctgctggtccacaaggaactccacggtacccgcgttgaggtacttggccgcactggtgagacgcaccgcgtcgtcgatcatggccttctcggtcttggggtccagtcccacggcgggggcggtctccagcaccttctggtggcgacgctgcacactgcagtcgcggtggaacaggtgcacgacgttgcccttgccgtcaccgaggatctgcacctcgatgtggcgcgggcggtccacgtagcgctcaatgaacacagtgccatcaccgaaggcagccagggcctcagagctggcacgctcgaagttctcctcgagctcctcagcgcacgtgacgacgcgcatgccgcggccgccgcctcccatgctggccttgatgatgacggggtacccgacgcccgagtcgatgaaggcgcgcgcctgctcgagcgtgtggacgggcccgtccgtgccgggcacgacgggcaccttctgctcgatggcgatctcgcgcgcggccgtcttgtcaccgaagcggtgcaggttctcgggcgtggggcccacgaacttgatgccgttcttggcgcactgctcggcgaagcccacgttctcgctcaggaagccgtagcccgggtggatggcgtcgatgttgttctccttggcgatctggatgatgctgtcgatgtccaggtaggcgccgacgggggacttgccggcgcccacgaggaagctctcgtccgccttgtagcggtgctgcgtgaagcggtcctccttggagaagatgcccacggtgcgcaggcccagctcgttgccggctcgcatgatgcgcgtggcgatctcgccgcggttggcggccatgagcttcttgatggtgctggcgtcgcgcgtctgctgcagccgcgtgaggctcgagcccacgcggcggccgacaagaaggcgctgcgagcggagcatggcgttggtcggctgattggcggggcgcgagagccgaacgcagaggcgcaagggaggcagcggagaggagcttgcgggccctgggcggcgagttcgcgaatgagcctgaggtggctgaggccgcaaaggtagctgagctgctgggtaagatacgtgttggtgtcggcagcctcgatcggtgacagagagagtgtcacgacctttgggggaagcatacaaagttcaagatgtccgtaaccagatgggcccgtttgtgtgcggcacatgggattctgacgtggcaaagaccggcccgccagtctcacttcaaacgcgcgcgttgcagtctgcaccggcagtgttgggtgcgtctggttgtcgacgcaacgagccgctgtcactcgcgcggactggaggctgaagcacgtcggtgttgtggtggtttgtccggcgcccagctgggcgagttgccgcggaaggagatgaggcggtgtagcaacgctgaaatcaacctccgccaggatgagcatgcaacctgcactgtaccagttggaccagcgtgtaaaccccccccaccgtggctttgcttgctcgtgccctttgaggagatggggatcggccaagcagaaactctgcttggtccagggttcgacggtgttcgccccccgccacgctcgaccggcgctgaagttgcatcgagctttcgaggccagcaacatctgcgatcttgcgcttcaacccgctacgacaaatctcgccatacactcgagcatcgtcgctcgggttggacttgcgtatctgcgtatcgcctgaagccgcaatcgctgaaaccaatcggcgggtgtttgtgctgaaaagccgtccggacttccatgcactgtacagtgtagttgaaggtcattgttttcatcatgttatcactgcttcgcaccgtgaaattcacctgtattcacggtgaatatctacccaccggaatggatatacgtgtactcatgcgcgcgccccgcggattcgtggccaaagggagggaatgcacaccggcaacttgcaccgttcttgcatcggcatccaatcagctcgattattagaaaaaacaaaaacgaaggaccatacaaaagcgatccatggacacgtgctgggcattgacgggaagttttccggttctgcgtcggtgtacgaactttggtacatgtactgtaggtgcaacttgtattgcgctttgcagttgttttgctgtgtacagtagcaggtactagttttacagccgctataaatccagcaaacctcgtcttgtacaatatcgcttctattgccaaaatcattgcaaagcacaaaacttgtacatattattggggacccggggggtggacccggggggcttcgcagttcgaagctaacttgtatggatacccttacagggaaacgatgtactcgggcatcccctgcgcctgcttcgcagctgcagcatctgcctaacctgccactggacaaccaagtgtaccaagtttgatcgcttattttcaaaggcattgccagttcatatacatgtatcgtcactccaacgaattggcacttcaacgcttgggtttgacaaacccaccgtggtgattctaccttctcctgctcgtcggatgagggctccacggatttagttttaactttagttctttgtagttattaatagtagaacagtaatcaacaacgagctaatcaacgtaatttccttctttcctgctactgaaatgtgcgctgatgcccaggcagaatcctgtattgcttagattgcagtgttgtgctcggaaacttgcaggtgacgataaacaagaagaaaaaattagggctccgcgaaggctgggataggagaattttggtataaaccccttctttttatttttttttcttattagctacggttatctcctgcgcctgctttgcagccgcagcatctgtccggaaatttgccagttcaaactgtctaccggcaatgcttttattaaaccttggttgatatctgtatagagcttgtagaaaaatccacatttcgttcatacatatactgattcataccagtgttgtcggtagtgtaccggttcgacctttccacgtgaaccggggtcataccagtgtgatgagtatcctaccggtgcgatctaccacgcaggggggccccgtgcggcaccggattcatatcggtttcaataaaatgtcggatataatccgatatggtctgcgatagcagcactaacgttgcttcctatcccagtaaaacgtgcattcgaatatttagcgctgccaggataactgctcaaccgagcttgcaggataaccccatgaagctggcaatttgcttcaagtttgatgagtcaaaactgatgtctagcagatttcgatcgcgtgcaggagtaggatacaccgggtgtttgtccttcgctttgacgatgtccgtctgggacttcctctcgcacaggaatccgcggcgtacagcgacaacgtaggagcattcaaactctgtttggtaaaacatggtgcagccgcacacatattttgtctgggtcgcctgaagatctaacaacaacaaaactgtcagcttcaatttgtccaagtgtggtattgccagttatcgagtattaaactgaacgtgccgtatgcatgtagcattaggatgatctgaactaataccggtaacaatgacttgtgtcgagattccgtaaccagaccaggtgacacatatatagagggatgtgattggtcaaaaataaggctttgaagtgcttttgccagaagttcgcacggcgacgtatggaccaaggagtcctgggagtcctggagcttgaaagtgctcatactttttacgtctacacctattttaataggtatttaaaagtgcattctcctatatattaccaccactggactaggtgcaattcctccccagcagcggcacgattgccctctagtaggtgcggacacttagacgccgctgctgggcacttgtccatctcctgctgctcgcattgcctccccgctctgggactccggacgagctcgtgctcctgtccgcgtttctcggcgactggaccacgagctggcgcgtgtaacaatctcaaatacaaagccctcgctacaatatgtcttagttgagcgcaacaaaagttctcagcccgcctctgctgctggcggcgagcagaccaaagacgtcgtatccgcgctcgcgaccttggtcatctgactccaggtgccgtgcgtggcagctcttgggccccagtaccaggacgaccgccactgctcagaccggttagcactgggtctactgattgagcctaccgattgataaagtagttttgaccacagggtctgctgtgacggcttgcggtctcgcccaaattggcacctgctcccgcctagattgtgttaaaactcagttttggttggtcaaacttaagctttatttttctcttaatgccctctaatagactagtgctcagtcgttggcaaaaggagaagtgagatctctccgaatgccgtcaatcatcatcgcacgagcggtcgccaacagggcgctccctgattggctagttatgtagtcctatgattggctctcccttaaccaatgggagagcgccttaatgccagcgggtacactttaccctcaagcctttacagagcctttacggtctctcgggaacctcattctaacactcccactaagagttcaccggtggtagtacgctgttgacacctatcttatccctcaaaaatgtaaattgtttagtaggaagggcctcagtcaaaatgtttgctgccatgctagctgttgggcagtactcaattatcagacggccttcgtctactagtctcgtgtgaacaaatactttatcgcaatgtgcttactagccttggggttgcctgggttctttgtgatactggtagcagacctgctatcacaccggacttacacaggtttcgcttgaggaaaccccatttccgatagcaagtgccataaccattcgctttcctttgcaccttcgctcaatgcgataagctctgcttctgcagctgatagggaaacacatccttgcttactactgcaccaagatatactgcagccagccatcttaatcacatatcccgtgattgttttacgttcttttgattgacacgcgaagcttgcgtctgagtacaccttatacgttacgtcctttgactttccgtcaagtaatagaccgtacgtcggcgttcctttcaagtatttcagtactctcctagctgcttcccaatgggttttattgtagcaggacaaatacttgctcaattccctcactgcattagcaatatctggtctagtacctctcactagattttgcagcgacccaaccaaacctctgtaatcaaatttctgagctgttatctcatccgcagtcatcttagtttcaggttctaactcaagacctgaggtgtcgctacagctgaggtgctctcaatgtgatacttcttcagtagttccaatatatactgatgttgagagatggacattgtccgttcttctctgtttctgcggacttccattttgaggatgtagtggacatctcccaagtctttcatcttaaatctcatagatagctccgctttgactttgttgatcagtcgcatacttttcgatatgatcgtcaggtcatcgacatatacaacgatgatgacccaatcatctcccactttttgtacatagatgcaaaactccttattgcaacgtacaaaaaccattgatgtgagaaatttatgcagcacctgataccaaattctaggagcctgcttcaacccatagatgctttccgcagctcacacacatagccctccttccctggtgcatgatagcccggatgtcgtctcatatatatgcgctggtctccatccatggttccattcaagaatactgtgtgaacatccacctggtggatatggcaatctagaatggtgccaattgctcagacaaggcgtaaggactcaaacctcgacactggggcgtatacctcgtctacaccaaatccaaactcttgatgattctttgagcaacaagtcgcgctttaaaacgttctattactccattagcatggtattttaccacaagtacggtagtgcctttctcccaggtgacagctttactagcgtccaagtgccgttgtctattaggggatcgtactcaagatcaagtgcacgtcgccactctttcctatgtggtcctcgcaatgcttccttaaggtttcggggtattggtatcttattctggagaatttccaggccattaactttgtccatgtgggtttggtagcacacataatccccaaatttaccaggcttttgtgtttcacggcgtggtcttttagccggcttggctcccactgcctctactaaccctcgcttttgcttagatgctcccactgtttggtcagacacttgttctgtatctggttctcccactgctcgggttggccctgagcctggtttagtatctcccactggtggggtagagtctgtattctccacattttgttcctccaaatgcacgcaacgctatatcagccccgtgttgtgtgtcgaacattacgtgccttgagtatatgaaccggttgttgtacagatccaaaagccggtaactcttgtactcgtccgatattcccaagaatctgcactttatccctcgtgcagataatttcttatcttttcttcgctctttaggtacatgcgcaaagcatatacttccccaaatgtgaaggtcacgtatgtctggtggttaaccgtgcaccatttcgtatggggtcttattacccagacgactcataggcgttctgttttgcacatagttcatgtacatcagtgcttctggccaccaacgatcagccatctcagcatctttagtacacagcgcactttgctcatcttagtttggtgatcgcgttctgccgctccattttcctctgggcagtatgcgtttgacttttgaaatttgatacccttgctcttgcaaaagcttttaaaagcttggttcacaaacttggttcctccatctgaccttatgcgtcggattttaaacttgccttctctctctaactccagaagcaacgtcttacctttttcatttacttcccctttgttgcgcaacacataggtccagcgccaggatgtttggtcgtcaatgatgctcaagaagtactaatggttcccacagttccatagactcccattgttttcatgggtccgtttgtatccatgtggatggtactaataggttgttcatctctggaacccttcagatttcggtatgacattcttctcatcttcatttctgcacaagtggaacagaagaagtttatttgtcttagcttagagccctcaatatacgatattccttttacaagctggttactcattatctcaatcagtttatccttatttacgtgtcctagacgcacatgccattctctcattaggctctcaattttggttaggcttggcatagtcaatggcttaattggcgtagccttaacagcattgcacattctctgtctttcttttgtagtacagacttgcacatagtatgccccattgaaagactttgctacaaatattaacttgtgcttccaaagtatgaacttgtacagtccgctgttacttgccacaatctgataacctgcccttttttagccaaaactcacttaaggtatttgacttagcatgtggtactagtgctatatcactaaactgtactgacttaactcctgttggactcatcaaagacaacttaacagtaccaacaaatgtatttctcagtttagagccctggtcaactgtaaaaacgtagtctgagttgggctgcttgctcacgaagaccaactcgcttgcagtcaatccatatccgcatcctgtatccaaaacccatgagttgcccgttagctcagtgataggcaccaataaaaagggatacagtcggcttaccgtatcttccccttttcttccaattcctcagcggcggctgtgaccttgacgctgttggcaggcatgacagtcttaccgtcgaactcgtcaatgtcgtcctcactgccgctccccgcagagctggaaaccaccggagagttaggacaccaccggagagttaggacttcccgtcggcgtgaccgcagtgtcgctcgccatcggctcatcctcatcttcatccttgggcggatccttttccgccttttccttcggcagatcctcattcgccttcgacttgttaatgttgaggcgttgaaggaccgcagcatccaccgggatctccttcctcttgggagccggttgcaccttttgcacacgtgcatggtccgtcttccgcactttgagcgggcgaggctcgctgaagatgtcttttcgaccgacgcccttggccatgtcctcctttctcataggacaatccttcttgaagtggggcccaatcccgttcttgtcgttgtgcacgcctttgcagtagaagcaggcgttcggttgctcaacatccgtcggcagcatcatcgttttgcgcttgccggacttcttcatcggtcccttctttgcgccagccattcctctggcagcgtagttgactggaatctcaatcggggctgagtcgtcttgcccatcgcctgaatctcggccttactcttgttgccgaagattgacttcaacttggtctcaattttctccagggtgaattcctcctgcgagaatgtgacgctaggtccccaaagatggtccggtagcatcgcaagcaccttcccaatcatcagctgacttggcagcaagtgcacacgcagcgtttcttgcccttggcgattcagccggtttctcacgttgcgcaacttctgaaagagttcggccacggatttgaagtcctcagtcatggttttctcaaattccatgatcaactccaccatgcccatggcgtcgctcttcccaaagtcgacctcaagttgcgcccaaaacgccgcaaccgtttgtgcagagagtggcgtactcagttgattcatgtatgcatgaggcagggtccggttgaacatgtccctgatgtaggaatccacttcgtccagcagagccacctcatactcatgttgattgcgagcatcatccgtagcatctggtcccggatctgcgatatgggcaggacgcaggagcaaatcctggaacccgtgacggggagcagcccttccgacttgaatctcagagaccttgcggctgttggtcttgcccacgagatgtgcgaccacggcgtctttccatcgctggaagtcgtttgggttcccattgaacttaaggccttcgaagggaacttgggtgtccttgaccatcttcgagcactcagtacttgaaatgttaaaactcagttttggttggtcaaacttaagctttatttttctcttaatgccctctcatagactagtgctaagtcgttggcaaaaggagaagtgagatctctccgaatgccgtcaatcatcatcgcacgagcggtcgccaacagggcgccccctgattggctagttatgtagtcctatgattggctctcccttaaccaatgggagagcgccttaatgccagcgggtacactttaccctcaagcctttacagagcctttacggtctctcgggaacctcattctaacagattggcgcctgcgttcatgacgacgaaggcagccatcgcagcgacggtatgctgttgcctggcggcgcccgctgtgcgagaagtgggcgaacatttgagccaatcatacaggcagaaccagcgtaacaaacccatgctacgctttcactgttaaaaaagttgatacaccatcctgtttgattgtatcgttgtattgagccgatcaaaattgttatgagaaatggtaagccgagctggttacgctggagtacaaatccctatactgaatttactatagttggagattgtactttgaacttgttttgacaagaacaggatcaagtagtagatcattctacaccaccagttcggtggatctctgtgggtcgcattgtagtctcacacaagacaagcttaaatcatccaagtcttcgtagataaatgcctaagctagtgcagctagcttttagcctttttccggagaagacgtaccaccaggtgcagctctttttgagtctccgctgaatgaactcgttcgccaccgtataggacgtcccctcattgtcgacggatagagttgggtttggattaaaaaactacgttgaacgaaaaaaaatcgagctatacttcccatcttggatcgcacaacctaggactttaagtagttttttgcaatgtttttgtggaatgttttatctatccatccgaattaattccaacgagtctggggattcacacaatatcagcccgccgacagtttatgtcacggcaaactaagctgactacacgattttcaatctctctctcagaaactatgcatgcagaagaaaatctgtgtctgaaagaggagagtataagttatgtaggactcataacagatcgaatcgataattttaccgctaatggaatcaataagtactatgttgagtactttgaagctgcatgtacagtagtaagtataatacgatgcaccagttgtgtccaaggttagcatcattagcaccgatgcctcatgttgatcgaaagaatacaatgcttgctaatacacaatacgttgttcgtcgtagtagtctctgatgtttgtgatggagcttcacttccactgatggcatctgacatgaatctacagtacagtagtaggaaaaaaagctccgaggtgaataggcatccatcaaaacctgtaagtgtcattcagaccgattcgatcgagtgctgtatgatgttgtgtgaatgttgtttgatgtcatccgcacgggggaaagtgacgaatgtagcgtgaatatcgttcgatgccatccaaaaaccttccccaatcgacagttcctcgaactgcgaataaatagtggggtacccggactggtggtccgggggggggggggggtcgcagttctcaggggcgatttaatacatgcagctatatagaattccgacatcaaagtatcatttagtacgtatccgcaagcatctcctgcgcctgcttcgcagccgcagcatctgccccgggagtatgcctcaaagtataagtaacggtaaaaccccttacttttaagcaaggggacatttaaaatgtccccttgatcagcagtttgcagcggtgcaactcctcagcaatcttcaccgcttcaattgtctcggatagctgctcaatttcgtactttcagagagtgaaagctactgtaatgcagtgctgtacctgtgttgcacgaacgtcgtgtgaaagtccttcgatgacaaactcgcctgggccgcctaacgacagttcttcgaactgcgaataattcatgtattttcactaagtaaatcatagagacgtattacctgtcaatacagttggcaaaagccgtgcttcgcccgataaaactctgaacacggaaacctctatatcatagaaaattgattttgaaggtaccgtatatgacagaaaaaagcattcgctgcttgctcaaaaatgctgtcatctcaatgtctcgaaaacgccgtgttttgtcattctcgacgccgaaaatgccgagttttgtcatgactttttttatgacctgcagatcccatttttaatcgtacagtctggatttattttgacttgatgtttgtatgtttaatttaaatattacaactaattagcaaaatttcaattgaatatagtaatttatccaattatgtcatgtcaaagcaatgccttgttactgtgtcatcgtggatgtcacaaaaggccgacttgtgtcatgtaaaacctggcaatatgccaggttttgtcatttttgcgaagaaaaggccgaaaatgccgacttttgtcgtgtgcttttattctgtcatatacggtatttgatacctgcacctccacgaggtaagcaagtacagtacataagaccctggtccaggtaccggaatgtgttctgggacccccaaatccttgagtttgattggctgttcgaaaacggtacagtgtaccttattctgattccgcgttctgaaaaacgtgattttcagaacaccagcccgaggcgttctgaagtggggaatacgggagttgatatcaacagagcgggtcccgataaccgcagagcgggtgctgtactgtccaaccgactttacgacaagacacaaaacattgtccaaaacgttgacacatttgagctgtttgttggtgcttaactgaagcaacagcaaaagtacaaacgccaagcattacatctcgtaatacaaacggataaagagatagagcttcaccagaatggacactatgtctcgtttgcccgacaatggaacctgtgacggtgcaacagcgctaccgagcttggcacctccgactgagcttcttgcagccctcaatctggatcattccgtccacggtgtggctcttcaagcgggacaactcctgactcaagacactagctcagcgtgttccatcgccgacactacagaagcacctggggctgtagcccaatctcctactttgggaaggctggatctcgtagtagccttggtgtcgcaatctgtgcaagtgcgctctgcaacgccactagtccaggcaacatcggttgtgcagcctgtggtgcaagcatgacagccgcctctggtctctgctatggagctgctaccaacattgccagctccaccgttcaccatggcgaacccagcggcaccagttgacccactagagctggtcatgttggcaatgccgccgctgccgcaccggccgactacagctacgtcgctatcgcccacggtccaggcaactgtggaaagtgatcaaaattcgatctcgtctcggccgatgcacttgcttcagtcggcgcgctccccatcgatggttctaggcttcggttacaccgggcaagcccccgactaggtagcttcccatcaagcgacaccatctcgtccggtcttgacagggtcgccattgccgccagcggtgtatcaaccactttccactcagtcgatccagcattcgtatgctgcgggcgcacctacgtggtatatggattgccttcctgagcaggtgttctccactccagcggaagcttaggccgctttgaatcaattcgcgcggggtcgagggtatgcggtggtgtacaaaaccacgagctacgattgcatgaggcaaaagcggttgatccagtacggttgtgaccgccatggcaagcgtcatacccacaacgtgctagcacaagagcgtcgccgtccgaatgcaggatcaagacgatgcggttgcccgatgtctgtgtttattgttcgcaagacgcgatcgtgcggtggagtggtgtggaagctgcaacatcgaggatgtgcatttgtgcacaaccatcccccatcgacaagctcggcttcccacccaattcttcgccgtgcgttgcgtacacctagtgatcagggtggacagagaaaccggcacaaaagccacacaaactatcgtgcgattgcttcaggaagatccgaacgtcatcgttacgcctcgtgatgtttacaacgagcgccatcgcagttccgtggtttcgtttgggggccttacccgtctcgaattcctggtccagatgacacgaggcggtccccagaaaattgccgacgatgtgccgtcacctgatgacttggagtttgtatcggacgctgattggtggatgacttggatacggcgcggctgtacccgtgtgacatggatggcgactgtgggagagaagtgatttctcgggatgaatctagcgcctgaccgcagatgggcccacactggctggaagtgtgaatcctgggagtgcacgcccaggatttcagagaacactcagtccagtcgcggactttcccttacgatgagtgcctaaagtctggcggaaagtgtctctggagaatgtatcccagagtacacctcatcttgctgtggctcagagtgccccagagaatcaaattaccctgagaatcaacccactatcaccatgatcatgcgcaggaggccgctaaacccgctaaaagtgtggctttgtggagatacacgcgagcctgcaatgcagcagacttgttacccagagtgccgcacggaaacccagagcaccgcacgatgacctagagttcacctccctgagtgcaggtgacccagagttccaaagatgattctctgggtttggaccataaatccagactctctatactgaacttaagtgtctcccaaagccaacacccaagaatccccacagttccccaagattcctcagaattcccaggatttcagaagatgaccctgagtgtcaccttattttcagggattcgaatcagttcgaagccagtctgcaatcaaagtgatgcgtgaccttgaagaaccgttgtggatgcgcaactggatactttcgaggagtcgagagggagtcctgcaccatactaaaccaagtctaaggagccacaattggcactttcgacgtcgtgcgacaatggattcgcaagccgatcgcaagtttggaccgctgaacccaaggtatactcaatacaagacatttgaccccaagcatagtgaacagaagatatttgcccgaagaagagagagagaaagaaagagagagagaaagaaagaaagagagagagagagagagagagaagtagctgataaaaaccaaacagagttccttttaccctgtactgcgcaagtgatttcggccaagcctgccgacggaaatccggaggacccgagactacgaccgcgggacgctaagggcacatcaacggcgaaggacagccgtctgtgtgggctccatcgaaactcaagtccagttaggtggggaccagcgacggccttgagcttcctggagtgatccatctattccatatcctagttgggtcacttgctgtgctcatggtagcccatttcatattattccagggggtattctggggtgctaagtagtcgcctccaggattttgtattgactgtttgtgtgaagggaaggtaactgatagtgattgtattttcctcctttattggaggtggtgcacgtttgtgtgagtctcaggggagctaggcccctgaatttcagactcgagtgagcctagtgtgtgtgtgacccaccgtccaagggtccaaaagaataaatgacggatagttgtagtctgtatttgttggttttatcgagctaggagggcatttgggtaaggtgtcttctgagttccaagtcccagagttgactgaaatcctggaccctgaattcgtgatattcggatctaattctctggatttgccttttggtgtggaggtgcgttgtgaagtagacgtgcgctcccgcacttcttcgaggctacattttcaaccggtggagtgccgttccgtcgaaggcaaacgagccgacagggattacacaaggtacccacgccaaccaacgagtgtgattctcagggtttaaagctttgcggctgcgaatctctgggtccctcttcttgctgttgactctcaagtcgattctctgggtctacaccctggggaacagtcttgagctgcgctatacgaaccccccccctgggcgacaaaggtttcatcggcctcgcctcacagaaggttcaagaaggaacttttcaagtcgcgtataagcttgatgccggtcgtcggttgactcacctgttcttcgctcacacaagtgcggcatccgtttaccgtgaaaactacacgtagtgcttctcgactgcacttaccgtaccaaacgcttcaacatgccgctgctgaatattgtgggtgtgactggaatgaacactatgatacacatcgcccaagtcttcatggttggggagacggaaccagactacgcgtgggccttgcagcagtttattcagctacagtcaaggtttgaaatccctctacctcaggtattcttggtcgatcgggacctggcgttactgaacgctctggaaagcgttttccctggtgtcccagtactgttgtgcatttggcacataatgaaggacgtgcaagcccacgcacacagacggacgttcacgagagagaatgaccctgacacgaatcagccccgcgattcagctgcacacgaggctttttgtgaagctattgtcagagttatcaacgcgccgacaaaagacgagtacagcttccgtcgccgggaattgtattttctgtctccagatgaagccgcctgcatcgacaatgtttggttagacatttggaagcgacgaattgttcgctgttggactgacagggtggtgcagtttggaatgcacgtaacctctggtgtggaaggctaccacgccacgatgaagggattgatgggctcatcccgtggggacgttttgactgttcacaatcgcatggagcactggtggcgtcaaaccattaacaagcaccggaaactactctccgatgcagaggttgtcttaccgacgcggctacaatcttcgttctacgcggacgtggcgaaggtcattcacaagcacgcactcacaaagtgccaaaatgcgtaccacacgatggacgttcttttgcgtctctgcacaggtacctattcacacaaatgggtatgccatgcacgcaccaactccacagcctcgctaacagtggcgaggctcttcagccgagccactttcacccgcactggtggattcacagggctcaggctcctcgcacagtgagggctcgtattgttgaaccagagcgtattcgcgaccggcgagcacagcgagccttacgtagacggaatcaccacaccgcgggtaacggccctcgcgggacccgccggattccgtcatcatttgagttgatgtaaatactatagccgtgctgccacaacgacctctttgacaacatatactatccttcctcgtgaatattgtggtttatcatgttcgcttacaagccgatgactgccaaaatagtagtagtcgtgcggatctatgatccagaacctggacccatgacagataaccttcgaaacacggctgcggcaatccgtattataagcttttatgattaccactaagtaggaaaaatagtttgagggcaaagtatggaatattcaatgaccagtagtgttaatagctaagcagacgaatacaaaatgcctcgacggtattaacctgcatgtgccacttgcctcaactagtgccggcacagttgtgagtgtcgtaggtgtttttcttgttgaaatcctgcccgcaagccccgcaatgcgcacctctgtcgttgttcttcttgcgcttcttggcaatcgcttccttgtccgggttgtcgttgcagtagcggacgtggttatgcagtgcccgtctcccattgcacttcttgaagcagtgcacgcaccgaaaaaaaaaacacgcaacacgctcaacaatcccctcgtcatgatcgacaccgtcgacgttgacacacccatggagggggacattattcactgcagttgctacttctgcgtgtgacaggtcgccgcgaaagacgagcatgtcgccgggttgcatgtcatcgatgataatccacttctaccggaaggcattacccgcgaaagcccgcggcaccatggtcatcactgtattggactccaacacaagtagaaacgaggcctgtacccattctgttttgattgtagcgtccacacacacgatggaggtgctctgccttggcatgtggctgcgattccagcacggttagtctcttggagacgctcgacgcagggtgaattcttgccgcatacgcaataaagcgctccagcaccagctggaacgcagacggggccgtggaagtatcattggtcatatcgacggacatctggggtcggttttgacaatttagtaggcgcagccaatggcgcgggtgcgtggctcggatagcgcgaagtacaatgtccacttcgtcttcagtgaggatctgggcaaccgtagtataacccttgttccaaaagttcgccctcatcgcagtaacagacagcggtctagtcgcggtgtcgccagttgactcggcatcgctaccgacctcgcggggggcgggtggaacaccgctagcgctagcatcgctagaggtaatagtagatgctggggcagtgccatcatcaccgcgggacgtcgcatcaccgctggcaagcccgtcggttgcggccacagtacgtgtcggagcctcagcttcgtcattgcgtctcaggcagttaccggttccggcggtagcgacttgcgctcggcgattgttcttttgtgcgcccggcaagttttttttttcttggtggtggagcgccttgcacgcttcgacttcacagtagtagcggcgttgtcataattgggcgcccgatcctcggcagcaccggtatgttcctcgctgcggcgggcactgagagcgagagcagtagcagcagcctgcagggatccgcgcgcacgggccccaactgcttttttgctgcgggggtgggctgtattcttggtactcgaagcgttgatgtccccgggacgggagcttccaccgacggcagcagcaccatccccgccagggctcgtctcatcaccgcttatagcagtgttgttcttgggggggggggggggcgtgctaacggcccttggcgttcttcttggtgctggatagctccccttcatcgcccgccgcgcgcctttcgccgctactgcggctgcttgccttcgcagtaccactcgaggggccacatgctacaccgctcgtttcctgactagcgctgctgctgcgggcgtctgagggctcggaacgtgacggcagattctggtgcaggttggactgtggtggggtcattgcggcttatgcatgttgtcgctggctgggcttcttgggatctcccgctcagcgatccgaaccgctcgtcataagtacgaacctctgtcgtttagattgtgcgcacttttgtagccatcaacgtctttattttgtacggtatccgccagcccgcggtcacccatatggattctatgactagcccgtagtatgcagccgttctgcggttaccgggacccgctctgttgatatcaactcccggggaatacgttctgggcgctcgttggcataacaacgctcagggcggggaatgcttttctcaaaatgcgcctccgaagttgtcgagggcatcgtagaaagcgtcacgtacttccttgctagcaggagcgatgccttgcatctagcaacgcacaggttgtagcgtaggagtagatgaatgcatctctaaacagaaaccgagtagtactatgttgcctcaatccacgcgagtgggcaagatcccattctccatttcttctccatgataaagatgctggcatgccttatgtttctacatgtatatatgcctctttaaggtaaatactgatgtcaatggctcatgcgtgtacatgtaatgcagcaggctagctcttgctagagcgcagtaagtcacaacgcggcagtgcaagtgcaatgatagcgcacctcgttgccgagatgtgctacgaatgcaagcctttctatcacatatttcgtacataaatttcatttcctacagaatttacttgggccaggttcggaacgtgttctcaaaagcatgataattggcgagcagaaccacaaaaccctaaccccagcgtagcccaagaacgcgttttgctacctggaccagggtctaacagacaaaatgggactgagatggcagtattatatggtaggctctacccacaattatatttatttgagtgataagtcttagcagtaacgacaagttgtctaggccttcattgggtgtaaatcttcgatgtcgattacaacgcagcatctgctattttgacgcgaaaactggcaatatatattccgagagctgatttaattcttcgagttaagattaatttgtttttttaagtattgagtgttagtgaagtcaatcaatagctggacataagcgagggggggcatgcaataactggatcagggaacttatgatttttgtcaggtattcacgatgtaaacttacttctttccttgaaaataacgccaaataacattttgtttcagccaatcatatgagagatcagccaaaaataatattggccactaagcatcgaggaaccctgaataggagttccggctatcagtcatagaaattggtcggaaatggagggcggtgacggtccaccgaagggtaagtgccctgcgtgccctaagctcgtggcgaagtcgaacatgtccaagcaccgcaacgtgtgtgggaagaagaagccttcgaagacgcgctaggctataaaccgaatgcgttacttgtactttgtaaagcacacacatccgtcattgcgtcaagttcggcttgaggcttcatctcggtgtccacggtaagtccattcccaaccacggtgaaagccttagccatcgtgctcgtagttcatcaacttattggtcttctcaccaaatttgctaatttggccgcgaagcttgtcggggtgaagaacgaaaatcgccacccggttgagctctctaggagtaaccatggacggaccgcggtcgtgctttgccttgcaacatgccttcagctccgtgaggaaatgggcaaataggtccggatttaaactgacaccatagagtagatcctcggcgtcctttgttttttggtaatgacgtccattccgtttctccatttcctcaacctccacgcccagagcctcgagctcagcaagctgcttacgagccactacagattatgcatgttagattgaccaataattgatatcattctaaaatttatgtaccttccagtcggcggaattgatcgtacacgcatttttcctgtagcttttggaggattttgtccttgttcgtcgcgttaggaaccgcggtttatgagaaacgacgacttctctgctgggcactagccgctaggggtttggctattagagatacaggtgaagtgtgagttctaacagcccgagtccacccaaaactagatcattccgccttttgccgagcagagaacaaagttaactaccgctaatatagtcaacctttgcccgtgtgccaccggtggaagttagttgtgcagtagatgttgctggtgtcaacggatctgcccacagtggaggtacaactgcagctactgttagcggtcattcatgtggtgacggagccagcaacgccggcgccagtgctggagtcggccgtaatgctaaagtggcaggcagagctggagtctggtagactcggtggagctgctagtggagcatagtcgtctcaaggattttgtattggctgcttgtgtgaagggaaggtaactgatagtgattgtattttcctcctttattggaggtggtgcgcgtttgtgtgagtctcaggggagctaggcccctgaagactcgagtgagcctagtgtgtgtgtgtgacccaccgtccaagggtccaaaagaataagtggcggctagttgtagtatttgtatactctgtatttgttagttttatcgagctaggaggacatttgggtaaggtgccttctgagtgccaagtcccagagttgactgaaatcctggatcctgaattcgtgatattcggatctaattctctggatttgccttttggtgtggaggtgcgttgtgaagtagacgtgcgctcccgcacttcttcgaggctacattttcaaccggtggagtgccgttccgtcgaaggcaaacgagccgacagggattacacaaggtacccacgccaaccaacgagtgtgattctcagggtttaaagctttgtgactgcgaatctctgggtccctcttcttgctgttggctctcaagtcgattccctgggtctacaccctgaggaaccttcttgggctgcgctatacaaaaccccactgggcgataaaggtttcatcggcctcgcctcaaaagaccgtaaacaatcactggatacaatagaatcgcggattcgaccttaatgtacgaaccccagcccgtcttaggcccggtgggtacatctatgtgcgattattttatttcgcgctgctgctaacaataactggctcgggacaggctattgtacacacgccaccattaggcaccccagctacggtattatggtgatatacctaaaatatggatgtggccctaaactggaggtgttggttcaagcaaatacacaacagggtagcatttgtggcacttcatgcaagcctcaaagcaacactaagtttcaatcgtcaatcccgccgtctcaatgcgccatagaagccgcgaactccacaaccggacctcccggtgcattaactattccagtcttcctcgcttccactagggggcgtgccgagtcggcacggttatgaaatctacattatagcacctccacagatagggtgtggcgtggaggttgcacattgatgtggctccaatgtagacttcagtagcatcgcaggtgccatttgagatgtcaaccgcccgctaattcgcgtatagcgctctacggagtcggatccccaccggccaaactgtcaaacgcgacgttgaaaagggctgttgcaccaccaccacgaagcgaatgagggccatacttgtcaggatcttgtccggccagttggccgcgtgtttgagagcacggaccacatcacgcacttgcagattttggtgaacatcaatcttgcagagcaacgaatgttcatcaactcctagcttagactggtgattcgtgaggaaccatgccgctagcaacggacaacaccatcgggggccagatctagccatcactcggaggcccccgcgccaaatcgatcagatctacttccacggaagcatatctttacagcattcgccttctgcaacaaggtgacttcttttccacttttgtccacgaatattacatctgatctccgaattgcatacgactgcactttcgaaccttgagctaaatattctaacccctgagaagaaagttgacgctgcagaggtcgtacgcattgaggaagcaacagacattcgtggtgggttttcgataaacgtcttactgcagatgcattgtcgctccagcatcgaacatgaattgtcttgcctcgagactgttggttccacttcgcggttcatgtccacagtgccagagctatactaaagtgctccctgacgtttttcgaaaacccaccacgggtgcctgctgcttcctcaatgcgtacgacctctgcagcgtcaaacttgatcttgatgaatgaattgcacactgctagttcgatattggacgcatccatgtataattcgacgtctggtgttggtcaatccccagtgccagaggtagctccgcaaggcatccgtgcttcaagatacgacgaaaccagtagagatcggttttcgcgccctcagaaagtttaaccctgccaaaccgtggtgcatgcgtgcactggcactgtagtcgcttgtagaaggcttcgtagttcacaagcagttcgccacgtgaccctaaaagcttgtaaaactctgattgtgacgatgtacccctttttaacatggcttgcacaccgttgtgcgcctaagcaattttatcgtcggggtttgataccgtacggtgcattgtgttccatcggagaccaagcgcaacagtttcagtgctccacgacgacaactttcactcgtcgacggatattggtccaaggaccgccaactttccttagcataatgtggcttccgctaaatacaacctgtcaccaacgtcgggtcctgtaaggttacgattgtctacccattcaaaagggaagaactgctctaaatccgctgacgcaggcacggcagccggagaattagagccctctaaccatgaaatcgcgcgaccaaaaagtgtggagcacagccgaatggcgccgtcatatcgatgataagacaacacagctcattcacatacgcttccattagaaacacttggttagctttggttctcaaatgccgaaccgcgctcttcacgtcttccgtaagtatataaattcggcctgcatctccgaggctcccgatgctctgagctaccataacaaccgatacaatttcagctcctgacgcttccggtctagtgaagaggttgggatagatcctaaattcactctctgatgtgtctggacaaacaatatgagaacggaaccttaagctacaccggtctgcatggccctcagcaacacctgcacctggcgtcgataaatcaacggctagtgcaaataactggggaaagaccctggtgttacccgtattcattgcctcatcgtaacaaaacacgttttggcaccagtccgcatgtcctacagctactcttgtgttggtgacgctgttttttgccgcgactgacggcagctgtggaaaggcccttgtgctgtgtgttgtttgaatatatggtatcctcagaggccggtgaacgagaactgttgctaatggcgatagatttatcgttggctgtatctgctgctggcgttgctgcctcgtcggtgaactaagacgcaccggtaccaccgttgccatgacgcgaccgtatatgctgcactgactgcggaatcaaaggtagacgtgcagctgatctgctccggaagagtcataactgcttgtactcctgcttgcgatcctcacagcgcttcttaatctcggtttttaccccatcggggagtcggtttggcacaaaatgtccaccattgcttgggtaaccaccatccttctctgcacaacccgcaaaggatagaaagcgcaagcacaaagagtgattctcgcccgacgcaggatccacttgtacaggtatcttcttgagcacattcatgggaatgcagccgcaaattttgttgctgtcttgctgtcacccactggtagttgctgccgttgtccatgagctcctttactatccggtgcggcgcctgggaatgcattactctgtgttgtcgcttcatcgacgtgccgatgaaccttaataaacatcagatcacggcgtaaacggtcatccgtcgagcatcgaacctgaacttggcgaatgtcgtcattacctgcagccgcttcgcgaaagtcttcgagcacatccttcacccagtaaaccacggaggagggcacgtttgggacccacgacacatgaatgagttttccttcaataaattcaaggattttttctgtcaggtcgattagctcctgccagcagtattctcgcgcataggtcaccaaaacacgggtggaatccacaaaatcttctatacagttcgccggtaccgctttctcgagcttcgctgtcgccgacaagttgtcaaagtttgatccacccgtctcgagccatgtcatgcgctcgtcccgagaaattctcgcaaagtgtctaatagaaaggcccttgggaccaaaccgaatatcaaaaacacgggtgcatacacccggcaatgtcttgaacttcaccgcgtcaaaccgatccattacattgatatagacagaagtaatcttccctttgtgcttgctggatgccattcgatcgtgcacatgctgctgatctgggcgagggttgaacgcatactttgatgctgtttcttgcttcttattcgctggtgttgatgctatgttcctcaccgcggtggatttgttgccctcgcttctgtcaccctgatcacgcctcaactacaaaaatcgttccaacagcgctgcgtcgtctccaagtcgctcaactattagggcgtcgctatccagtgcagaacgtgactcaatacgcgggtcctgaactttcaccacatacggctcctcttcttcagcgagtggttggatctcccgagccctcttgttgcgaagttgcttggcagcgggtatatcaattggtaccagtatttcctgcccggaagcgccctgtggagagacatcgtcatccgaaaaagaatcaaatatttcagtagcgtcctggactccaccactacctccaccaagcgacccttgatgctgtcttggggtttggcaaaatgagctgccaatgtgagttgggactggcctatgcccaccatcgacgaaataggcaaaatcaactgcgtgttgaagttcgaacgcaatcagttttcccgatttggcatcaactcagcggcaaagtttggccggtgagggaaatgcttcttcggtcagagtgccatgcagtatctcggtgatgctattcgaagcctcttcagcatcttgccccgatccgcggtccatgaccatggttggaaggctatcgatttcgctgttgcttcactcactgtagtaaaactcgacgtgctgaaattacagggccactataggcggtacagtcgatacttcatctacgcttgcgatgatctgctccccatcatagttgatcgtcaactcgtcgtagtccaccaccctcactcggccaaaatgaacccggtcgcctgtcattatcgcgacggcccgtcttagaaacgaaattggtcccgccatatgcatttcacctgctgtaaccaggtaactaagggtaacatcattcgccacactaccttcaccttcttctaggctccaaaagacggcatcatcgcgctcgactcggacgatcttcgcgtaaaacgggtggtcgaagccgtcccctacccgttcgtgcgtcaaatggaggaaggctcgggtagagagtcgcaccatgttccggagtgctgagagcttgtcaaagcacgagtgctttaactagagaagcaaaatccgaactaatgctacgactgttgctacaggcgcctgcgactgctccagagagcactagagttgctttgatatccgctccgtcgactcaaaagctattttcaggtcttctacctggaaatttccattatgcgaaggggccccaacctacacgatccagtccccgaagcgtcaacagctataaaaatgaagaaaacatattttagcgagaaacttagtcacgcattcagtttaagctgtaaacgtcatctgaaatatggtctgcaactacaagcaattcaagtttagggcgttttagtttaggcatctactcagaccaaaaccgaaattacgcgggacagacctgtacatctaacacatcgtgtacgtgttcgataggctgatctcaccgatattttgatgaacactaataaaaacacttgttagcagagactctagagaatgcgggtatgaagtaacgggcaggtcgtacgcgtcgagtgcaaagttgctagttgcatcgtgcccccctgcagatcctaaaggcctcactccgttagaaccttgatcatgcccttgatatgtttatgagatcgattagttcgaaccgtcactgcgtcaatgactacacgctgttaatacattgctaggtacaagccttacaacctagttaatcgtcgctgtagtggaactagcggcggttccggtgactacactagcgttcaaactatagttgaatgaagagctggataatagccgccctaccgtttatataatatataaatggaatatattaaataccctgagatgatattgtaacggggttacacgcacaagtggctatagccacttgtaactctaacagacacgacgtctgttagaggttcgaaagactttctcgaccttggtgtaaggtacaccaatggctacctacatttgggaccaccacgacgggtggttcatacacatttaggattcctataggctgaaagcagcatctattagccaatgagcgacttgcatgttagcgaaatcctgccaaccagctgttggcagattcctagtttagaatattacattttggggaagtcaaagcataaatcacaaataacatttctcatctttccaaaacccgagtctttatcttgtttaaagtctactcgtggatctcgagtatacttaactcaactaaaagaaacctatgcttcctctaacacgtgcgcacacgtgtaagccgtagtagtgagccaaagtaggcccattacacctggtagtactttgtagtccgtccaacaaccgagtacctgaatgttcgtacggagctgtaccaacgaggacccgagaacctattcatgagagcggaggtgcccatgaaaagctccactacgtctgcaagtcagttgcacgcgctgactgcctccacctgtcgggcccagagtgggaggcactccaaagactgtcaacagtcattggagaagcggctgtagctgcaatgctgcgcacactattgccgatggaggaacacggtgttgctcagggattcatcatgaaggagcagcgtgatgctgcttcctctatcacggtggcgtcggggacgacaccgtgcgagcaatcgttgaagctaaatgtgagcaactatgtcggaagagagggcgagcctctcctccgttggcttgtcgaactcgacactgccatcgcggctcgacgtatcgtcgacccgttgtccaaggttgcgttcgccatgtcaagtcctggcggacgagcgagaagttaagcgtatgaacgccgactctctgatcctacgtgcttcagcacgtacgagggtttcaaggaggagctcagacaagcatttgagcccccgcaaaatgaattccggtcgagggcgaagttactcgacctgcagcagggcaagcatgatgtccatgcttacgctcagagagcacggtatttggtctcgaacattgtgaccaatccgatagacgaggcgactaaggtcgtcacgttcatgaaatgacttagagatgggcctgtgaagaccaatctcttccgtgagtacccgagtactctcgaagctgcaattactctttcaatgcatgaggagtttagcctgcgacaggctaagctgcatgcgaatgcgccgaggctgcaaccgcctccggtcgcgatagcgggaggtccggaaccaatggacctctcgaatgcaacggctgctgattatcaacagcaacaaggaagtaatgtacgatgcttccgttgcggaaggatcggtcactatgcccgagagtgcacggcacccgtgctccgagatggtggttgacgcggcgatgcccggcatcgccgcggacaaacaaaaaacgctggaacccagtaggtgcggggcgccctactggtgaagcagtcacgcgtgttcaactcggacatgcgacactgaggaccgcagccaccagtgaggaccattctcactgcaaaatgcatgatgacaaactgaaccttgtcatcttggacgtgtcttcgaagagagagagagcaactctcttcgtgctttggtagattcgggcgcgtcgatgaactttgttcgactgcgaagtctatcaaggcttgacttcgaggaggtaattatacctcgaagtatgttagacgttcgattggcaacgggtgccatcgttaaaaccgagaagcgcatggtacgcgtgcgcttcatgtacgaacatcgagtgtttgtcgaacgcttcatcgtcctgggcctggacgataagtttgacattgtgttgggcatgccgtggcttgcacggcatgatccggtaatagactgggagaagcgcactcttgtgggcttcggtcgcgatagcggaacagagagcgatggccctgttgccgcaacgcacgcaccgacaggtgcgtgcgttgcactctccagtcaagccagtccctaatggcgttgtcccggagcgctctgggggcgctaacacgcgcgcaagagcagcaagcgtcggcaccaccgccgacggctgaagaagaaaatgtgtcgatttcggagatcgacacaaacatttcagtgaatcagtctccagccccaaggccgcggatgacgcgtatttgtcactaatgtcagtccccgagactgacacaaatctgattttgggagtgtctccggcctcaaaaggcgcggatgacgcaggcgagtcacacgccgcagccgtgaaggctgacgcgaatctgattggatcagatctggacaatactaagagccaaagtgacgtagcgccgtcgactccgggagtcgatggtttgatttgtcggctctgggagccgacgcaccttccgtaatgggggtttccgccaatggttggcgtcgaggtattaaaatcgcgtcggttccgggaaccgacgctgtgaaaggaaatttcgttattggccgagccctttgtaacgaaaggctccgccaataacaggcgtcgaggtgaagatggcgtgtcggctccgggagtcgacgctgcaggcggtgcgggcggttgcaaacgttccgcaccggaaaaacttgcacactgtcgtgcagctggactgcacgacacaaggagcgctttgaagagcacagctgggactcgttgaagacgagtccctactacaagatcttacgggtgtacgcggacgtgcttccggaagagattcctgcggagcttccgcaggacaagggcatccagcacgagattgatctcgtgccagggacgaagtactgtgtcacgcgacagtggccactgccgcgagagcaggtcaaggcgatcgacgacttctttgagagtcgtcgcaaagctggacaagtgcgggaatcgaagtccccgcacagtgctccgacgttctgtgtcaagtagccacagggcggctggcgcatcgttcatgcgtacaacaagttgaacgatgcgacgataccggcacagacaccgataccgcgaaaagatgttatcatcgattcgatggccaggagcactatctacagtgatcttgatctgcgcgatgggttctatcagatcctcatgcgtgagagcgaaatccctctcacggccgtgagcacgccgagcggcatgcgctgggagtggctagtaatgccgcagggtctgaagaacgcccctgggaccttcaacaggtgcgtgagcacgggtatctcgctcgccccgaagatgcacttcttcaggttcgcatagagcttgtgcttgcacatgagcgcaagcagcttccggaggtgcaccttgtgcatctcaacatcgctcatcccgtccgcagccgggctgcggacgaacacatcgtcgaagtagctcggtgcgaagtggcgcaccgagcgcaacaagtgcgtcgggtgtctcgttgggaagaatgatgtccgccctgaccctgagaaggtcagagtgatcaatgagtggccgacgccatcgaacgtcaagaaactgcggctgttccttggcttggtcacgtacttgtgcaagtatgtgaaggactatgcgggcacgattcgcccgctgtcacagctcctgaagaaggatgccgagtggaattggactgctacatgtcagcaggctttcgatgcagtcaagcagggctggactgaggcgccgatcttggccatggccgaccaagatcgcccattccacgttgtgtgcgatgcatccgactttgcaatcggatgtgcgttaatgcagcacgatcacgagagccgtgatcgtgtcgtctactaccaattgcgtcagctgaagccagctgagcgcaactacccggtgcacgacaaggaacgccttgccatgaagtatgcactcgcgaagttccgagcgtacttactcgaaagcaaatcgttcgtggtctatacggaccacgcctcactgcgggcggctatgaagacgccgcacatctcgcaacggatggcaagatggctctcgttcttcgcggagtataacttccgggttgagtacaaacccggaagactaaatgtggtggccgacgcgctatcacgacgacctgacgacgccacgactgatgccgatgtcaatgccattgacgccatgcaatcgagcaccccaacatcgtcactgttagacgacatgaaggtcgcatccgcgcacgacgcggacgcgaagctcttgctggcctatggctcagcgccttctgacaaagctcgtcagaagctgccgaagcatcttcgtgctcgtgcacaccgttaccgggtgcacgacgggttattactctacagtgcagtcgacgacaacgcggaccgcgttgtcgtgcctaatgaccatgacctgcgactcaggatcatgtatgagtatcacgatgcaccgactgcggggcatccgggccgtgagaagacataccttcttctcacgcgggacttctacggagcccacaagtataaatgggtgcgcgagtacgttcgtgtttgcgaggtttgtcaacgtgtgaagccggcgcctttcgcgcaggctcccttgcagtcactgccgactccatcggagtgttagcagtccatgtctttggacttcgtgttcggtcttccccccggacagccaggggaacacgggcgttggggtctttgttgaccgcttcagcaagatggtgcatcttgctgcagtacccgctgaagtgactgcgaagcagatggcgcgtctgttcgtcgacatggtgttcaaacaccatggcatgccgatcgacattgtgtcggatcgaggcccgcgcttcactgcacacctttggcaaaaagtgtttacacttcttgggagccaattttcaatgtcgactacggacggacgggctgaccgagcgcgtgaaccgcgcgctcgtggacgtgcttaagagctacgcttactggagcgagtgtctgccgatggcggagttcgccattaacaactcggtgcatgcctcgaccgggcatacaccgtgttacgtgaatgccatacggcacccacgcctccggagtctactcgggatggtggcaccttccttgagtgggggaggacctacgactgcaacgcagcagccgcagaatgccgctgacacttgcacagtgtcagccgcgactatgcgcaagaagaacaagaagcacgcgtctgtgcagggcacagacgccgacaagagcaacaaaaagaagaagaacgggtctgtgtagggcacagacaccgcgaagacgaacacagaggccgggcctactgctggaaacgagctgaacgagttcaggtcagacgcaatcaacttcgggcagcgcagacaagccgccatccggtttgtccaagacgctattgcagcttctgtcgaccgacagaagctgaacgcagccaatgttggtaggggcaacactaatgaattcaagaagggttcattagtcttgttagctacacaaaacttgcctaaacatgccgtttccgacttcggggcaagcaagcttgctccgcgcttcatcgggccgttcgcagtgctggcacggcacggcaacgcctacaccctggacataccgtctagcatgcgcctccatccgacgttctacgtcggacggctgaagtcatacctgcagcacgagctacctagctcagctgaaccgaagcagaagactcggcggaagctatcatcctctccagcgcgacttcacgctggagcagcaggtcgagctgaaggtctagcccggccgggacgatcgaggtggtctaggaggccgtcgcaaaataaggatactccagagctccaaacgcagcgctctgtaactactccacgaccgagttccggtcgtggggagacgcgagatcagggtcaacaccaagttgaccacacacggggcgtgtttccaccaccgtcgccaccaattcgtgacgcgcacggctcaactcgatggatagttgagcacattgttggtcaaagtatcccgagaacgaacaggcaacctgttcgtttacgtatccgttagagaggatcccctcccaaccaagatacatgggagccgcggaacgtcttgctcaaagacgttccgggcgtacgaatcccgccatgcgctacacgctggaaagtaatgcgaacgctgttgttaacaacagcgcccgaagccacttcgagggcagactgtggtacctgcccccgtggcagcgacgcgcttcgcacgctaacgcgcatgatacacagcaacagagatgtccccgctgctgcgccaggggtcttcaactttgacgtgctcgttacggaacgagcatgctctcttcaaacgtcacgcattgaccaaacgctcaatggtgttgacgtgccaagaccggcacgtctaaccttgacggggggatggtttaacggggtaacacgcacaagtggctacagatacttgtatctctaacagacgacgtctgttagaggttcgaaagactttctcgaccttggtgtaaggtacaccaatggctacctacatttgggaccaccacgacgggtggttcatacacatttaggattcctattggctgaaagcagcatctattagccaatgagcgacttgcatgttagcgaaatcctgccaaccagctgttggcagattcctagtttagaatattacattttggggaagtcaaagcataaatcacaaataacatttctcatctttccaaaacccgagtctttatcttgtttaaagtctactcgtggatctcgagtatacttaactcaactaaaagaaacctacgctttctcatacacatgcgcacacgtgtaagccatagtagtaagccaaagtaggcccattacagatattatgatcagatgattgagctcgctactcgatgcccgacgcctccatgggcttcctagcagtttgattgcacaaccatttgacagtcgcatgatcattacaagggttagattctatatggcgcactcgagagaagttggccgccgtgactggcaccaaatcgccgttgttatcggcgccgaagacccaaaacctacggtggtagcacatggtggtgcaaatgcggcagaaaaaagactttgggtacagaagagtgacctctgtaaaagaggagtgacactttgaggacagactgagccttcggcaagttacgccaagtcatctgcagacgcttgttccctctcgctgagaacgcatctaaggcaaactgcgcttggctcccagctactttgcagataaggaacaaatggggtagggctacacgtggtcgcaagcgatccctggtatccacgtcatcttttgaagccggcgtcgaaaggtattatgggcacatcaaggggtgtccaacattgcctcgcgggcagctaggcttcggctacagttgaacagttgcaagcaatgtcagcactcggttaagcgacaagtgtcggtgggtccaccccaaacagtgttgtcaccgttgcacgtgatcgttaccgccctgtatgattgcaggtcaactttgaatttcgatttgagtcttgacgatgtaaagctggatattatccttcgtcgagttggtggatgtggtgatgaggccagaattgagcagtcgggattctactggggtgcaggcgatacatgcattcgtgccaacgaccaagtgatgtggaacctggaggaatccaacgatgactcgcgcgaaacagatgccactgtcgaacgcacaaaagtgcaagcaatcgatcagttgttatgtcattgaatttgagtaaacattgacatcataacgagaaacccacagggggggctttagtattcgcagtattttgagccaaatacagttttcgatacattacatttgctgtgatgagagcaataatagaagttgcgtgatagatctgacagctttcgttgtatccgccaatgccataaaccggcgatatgtcagtggggcaggttggcaagtgatcacacaccaaacgaagctatacccttcaaccttgggtaggcacctcattggtagaacggctttagccaaattatacctggtgcaagggctaacaatcatggatatcaaagcggacaaatttagagcactgaggattgttggaaggagaaccgatctagtggaagatttaggcagcgcagtgttgtaaaaggaagcaaggcacgcaagtagaacgagcgctagatcgaagaacaacagtacgagaagttggctacagcaagtagaggtcgttgcggcgaaggcagctgcgacaacctaaagcaatctcactttccaaccttccttctcgcgggcaagtagatccttctccatatataccgcgtgagtgcatcaatgcgttgacgagatcgattcaaatacaacaaggataccaaccatgagaagcaaaagaggctatcaccgcgtattcgtatcacttattcaccgcctcgccaattatcagaacgaggtgaatttatcgagtactatcaacctgccaacgctgaatgaactgaaagccgggaggaatacagctttatcggtgtgagggttctacttctgggacgtcatatttgactacgatgccggccactccgcccaacgacgaattggtgaagctgaacattggtgctcctcaatggctgtggcggcgttcataccaaatattacacgtttttagagcattgcaagtagaagggcggacaaacgcgagttcgttggctcaatctgcggtatagggatccatgaatttgctcatcaagatacccaggcgtgttcttgacttggaataactggatgacaccaatgatgagaaggcgcgcttcatgcgaagggactgctcggagcaacttcgttggactatcgagtcatgcgcatcattcgaggctttgtgacaaaaacggtcgccaatcagaaatgtaatactgcgaatatcggtaagatgatcgctaaatttaatgctgacaaaaggctcccaaggtagcaccaagtcttacagaaagcgcgatctgtgaaagattggtatcgcaactgtaatcaggtggggtgctaggcggggctgagctagcgatcttatgctgtcagcagtgaagaacgtagcggatcgtacggtattatcagatgaaaacacgactgctgatgatgaacacgaatgggtcgtcgactaaggtgtgacaaaccgtacgactggtcgtaccgagaatcttgtcgataaacacacgcttgccccactaaccgtgactgagagcgaaacatgctagcaacaacagttggttagacgacacggctgaacgaaatatgcaaatttgagctacaagacgatctaaatgtgaagggactggctcgcagtctcgtctcggttttggaagggctacacttgtaccctgtgtgattcgcaagatcaggtatgaatgtgtaagccccgtgccttaaccacaagtcatatgtggtcttgaacctgagcaacctaatcgacagagcgattgttatagaggctgttgctccacgcgtggaaacgaggcctcgaacgctttaacacaaaagatcgctgagcaagtactcgcggatcagacatccccggtgaggcgctatagagcagatgggcccaactaagagaccaattgaaagcgcaagaagcttgaagtcggctgtagagaggtgaaaagggggagggagctgctgggttactagtagctgagcaaattgaaaagtgagcgacgctcagacgcgaactagccaccgctgtagatatcggggaacgtagtttcatgtcgatgcagctatcatgagtttcatatgctagttacataaccactctgggaaacatgtcagaaattacggttttttattaccggtttagttagttacttgcgaatgtagcgtttaaaccaagcgacagaaattaaaaaccaattcttaaaacgaaattgaaaccactgcgctctaggtacgagtttagtcactaaagtgggtcaaaaagggaaagtcgctcgaaccaccctcgaagaaatcctcagcaggatcataggcgtcgtcatcctcgacactgcgtgaaagccaagtgggccagtcaggcgtctcgtaatcttgatcacctgtttccgattcgaacgcatagtcggaactgtcgccatcgctccacatgaaatcactgtcgtcgccacggtgttgctgttggcctcttcttcatcgccggcgtcttccgcttcttcaacgtcagactcgcccgactttggccattacacgtaccgctattagtcgtcgaatactagatgtacgtctattgttttcccagaaattacacatcatcggtggaagctgctacagcgcgttcgaatgcggatagctcagtcgccgtccacatagtatccgtattatatacaagacatatacaaatgccatcgatttgagaattaattaggtcaagtcgagaatatggtcatggtttgcttaactcgccagaatcacaggtgggcatgaataggcggatgcgcgtttgtttataagcattttccggctccaaaaatcctcccgctccgcccccttcgcgatcctcgcatgttattttgtacagcggaaagtagctactatacacatagggggtagggggtagtctcatcccattttgcagtgggcacaaatgaggtagggggagagtggcaccactttgcttcggggctgcggtagcgttagcggtagatgttcggactcacaaacggttttaaatcacccgctgcaataccagaacgtcgtacgagattgtacactctagtgttaagctcaaactggatgtatttatcttttttgtgagaataccgtcttaatgttaaaggtgtctcgcttataatatagcatagtgagccctagtgaaatgcatagtcggtgactttgaagccacgcacggattctcctactgcttcagttagatgttgtgtcacttcattaacccttcggataactctcgcataattccgttacaccctttacccacttttgcttgtcgacaaagagtcgagggccgaagacgaaccgcctgtcgagtagcttgcccgcatcgaggttgagaaccagggggtgcgtagagatcgatatattgcgttaataaataaaggttttcgtagtatctatccagatcagtccagtatcgcgaagatgggcgtaaaaatgacctgatcgtccgaacatcacgataccagatgcgaaatctcgacttcttcgcgactcgtgtcgccactaacggtgtcgttgtggtcaaactccgtgcgcaatgtcatttattaaaacaaccagggggtgagtagaggtcgatttataatcaataaatcgatctctactcaccacctagttctcagccctaacgcgtgcaagctactcgacacgtggctcgttctcacccgttgcttctttgtcggcaagctataccgaatatgtcctgcgtaccaaccgcggcagcaacgacaatgcctccagtagcgacgagctttagacgtagtatggattggattttcgcacgtaggtggttgtagaaataccccgctggaagcaccacagaaaatggtggttagaagagcagtggaggactcttatgcactccaggattgtctagctcctgaccgagcattcaaatcggatgtaccacaagaatcagaagaatcggagaaagcgctgccagcagttcgacggtaccactaaagcaacttaaacagcgagacggatgggccaatgatttctactccgggaatatatatatatatatatgacgatgcgtgggcgcgaggtcagatttataagcttctctgtcccaccaagttataggtattatcttaaatggaccgtatcattgcttctacttcctgttagtggggcagttacatgccacttagtttagtccaaacaacgcctgaccggttggaccacgatctcagacgatattcctggccaccgtgttgccgacagggggtcgactacgctatcattttgggacagtgtaagatttcagcgtatgtggtcggtggtaagtggcaacgaatcacaccccttgaactgaaacacgtgacacgatgcggctccagatttcagcccgagccccacgttgacggcctggttctagctggacccaggatccaagtggcgggaacagcctggatatgcactcagcgccctgaatcaggatgatcaaggtgcatccaggctggaccaagatcgatgaccctgaagtctaccagcctggaagccccccctcagccaagatcgaaccagccatgctgcaagagccgaagaggtgcccgaccaagctcgtcgatgcccaagctgcctgaccgaagcccgtggattccgaatcgacaacgtgtatcccgaatggacgactctccaagctccaagacccgaccatacaaacccaagacattaacgaccgaccaagccgaccgtccaagatctgatcggcacatggaaccttgatcttcctcccagctgtgctgctgatccccgcaggatctttgcgactcgaccgacaacaacccatactgaaaccaagataaaacttccaagactgcatgttacgattagtgatagcctacaaagataagaccaaaccaaggtcgttttccctattccagcacaagtgtcttcggttgggagccagactattcagagctggttcagactcaaaggagccttgtgtcgtcggtccttcccctgcattcagggcacctcggctaacagcgtaagagtcgtgtgtggagctctcatagtaagtatcagatcaagttaaggcgagtacctgagttgccgcacggccagggttgataagctttatttcatattctagttggggcgtttgtcctggacagcactgccatttcatattaagctactcctagggcggttgaggtagtcaccacctagtgatttgctgataggctactgagtgataggaaggactgtgttttgtattgattcggctttcccctcttgattgagggtggtgcgcgattgattaagggtgttggacttgccagtgtcctggatctaccctctttgttgactggtgtgtagggcccaccgtccaagggccaaccaaagaataagtgaaggttgtgtgtattgtatatttgtgtgtaactctgtatggttatctctccggatccaggctgtggaagctgcgttctgaagtctgcttcctgatcctagcgatattatcctgtttcccgcaactcacgcagtgcaagtctcacgttcgaaaacaaacgacacccaaagggattccacaagaaacacacgtcacccagaacgacaccaagtgctcgtccagggttgtttcgaggggacaagtctagatccactgtacagctgggcggcaaaaggcgttcacccgcctcacctcacacgtcgttgcatgtatcaaagtagcggtgatctctggcctcgagcgtaagtgctgcgccttgacccatcgacgctatcgctgtagacgtgaggccaacacggcagcggacccgaatatacgtatgcgtctgtccttcagctcgcctccgtggtaagttttgtacggcatctagtgatatggaagtttattctaactgatcaatggagtggtcgtttagtcagtatgcgtatgagttgagaaatagagaacgtaaattcgtgaatactcgtaaataacttcgtcttgagatactgaataatcattcagtgtccctgtaactagtattatttttacaatataggtcggtcactggttatcagatctatagagagatgaagtgcacatttgccactgccacctttgagcaagtcatacggcctggccagacagactagtttcacaagtaacatcgctctgataaggcctcaatctttcacatctccaaggaggtggaggcagtgtcagaacgcttgccagtatcttacggtaaggcgtctctaattaaatgggtggggtagtttccgtgctaggaattttgagtccccgtactgtcgtctatacaaacgttattttcggttgcgtttggttgcatcacgctgacgatgggtgagagccaccaagtatcgctgaacggccccatcgccaaccttctcgcacacgcgctctcgaagaactgacgaatccataacaaccgctctcacacaaacaaggcatcccaaagtgcagcgatattgccgggttttgataacgttttttctaagcaataaaaacatttgtgcctcgtgattttgaacatgctagcatattccgtgccaattagcatattatagtgaagtcctactgcggcattttcgtacgaaaatcgcgcgcagaagctgcatttgcatttgcaggaaatggcgattttgcttttagtcgggcagtcatcgcttgcgcctgttggtcaacgacgttagccaattgctgaagctgatctcctcccgcagcacttgcactcatcgaagccgcaatgggcaccacgcaagactggactgcgactcctccatttagggaattctcgacgacaagcaaactccaatgcttgttgaggttgttgggcagcacaaccatgtcggcaagaggcaaaaatcaagtgaccagtgatttcagccgtgccacgcacgcgttcggtccgacgttcataagcaaacgtgatttcggcgaaaccccgccgctaggacagaaaacacgagcccttttgtccgttctataaaacgcgagctgcagcagtcgacaacggccgtcactaccgattgccagttaataagcgatagctgcgtgtgggtgttgacgtctcgtcaatgcgtattttctgcgatcggggctgcggtacaaccagcaatttcgtaaaattaaactgaagagaaattgtatacatgagtgtcccgtttcatgctataggatgaatgcgtttatgtctatagaaagccacccccggtataagacgtcacgctgctaacaattgcgacagcggctgcgcgctaagtatgagattgtctaattgatgctacttccgtacggaaaaaatgatcgacatttgagcaatgatgctctatttagtgttgcacacgcagatatcttcatattatggttctagacaggtattaaatctagcaaaatgtatccaatgtcatgacctctttggcaattacagcatcgcaaatgaggaacttaggaagctttcctttacgacgcaactttggctttccgagatgaggcagtttgtccacattgccgacctcgcaggcaagtacacactccataatttgttgtagcgtgagaaatatgctttcaaacttcattttatctaagtgtctggacgatgtacaacctcgatcagctgctgagtagtcgcaacgtacgtcttgtactgcagtgcctggatagctgagaagtagcccaagtcaaggcaattaaaattgggcgagtttggcggctgaaacaggagccgaatgccccgcccatcccgcttacctatcccgttgtaaatctggatttgttggatgtatatggggagtagcgttgtcttgctcaatgtagatgatcttccctctgtccttgcgtggccacatcgcgcgtatcgcaacgaaagcatagtcgagaagaaattgcttgtacactttactgttcacagacttgatgttctacttgaatagtattcccttggctctattcttgctgctgcgcttggctacatagtcctccgcaatcggccacagtccaattttgctgtcaaacttgtcttcctgtgagggtcccgtctgcgatacaacaaaaataatcgcaaaattaggtcatgcaaaaaaataattttgagagtgtataaaatgcaccgcgttttaccttggtcgagcgacagcagcgaggaacaaatcttctcaatgtgtcgagcgctgtgtcggtggcgttgcggtactttctctcccttgaccacgtagtatcgccgggtcttcttgtcgtggttgaaccacttctcgtccacgtgggcgatgctgagcatggtgtcgaagacgtggcccgctacgtcttcgtgctcaccaacgtcgccgtcgaggaaggggagcgcgtacgggacacgccgaacccggttagcctcggtgagaacaggctttattgttgtagaccttgggacgacgtcccagcttgccagatagcgccgaatcacactgatagagaccttgacgctgagagtggtggcgcggatggtcgtcctttgctccgctgggaccgcttgggccttcttcttgatctcgtcctagttgtagcatttgcagagttacccttgaacttacaggatatatcatcggcaatgttgcctgcagcgacagacacgttgtagaggtcccaaatatttcgaactgtgtgcctgtgcacatcgaatttggtggcggtggctacctgcactccgtggggcagaactccgtcaatactgcgtttgagaagctattgcattgcgagtttcctccgttacgctgcggtgggtgatttccggaactacttcaaatttggctggctgttagagagcgtcgcggcgcgtgttttgcgagttgcacaaccagacttatattgttcaatagcggagagtctcagctatctaagctgattggttgcttacagaagccacaaaaatgcaatccaaatgtcgataaatttttcgtacggaggaagtacaagtttatcggacgagttttcacatggaaacagactgacttagcaacctcttactaatagttgctttgacatgcgaggttagacaccaaagcataagggaggcgataacaacaggacccctttgctaatgaccgacaccccgttcataaaccggtgcaataatggaaaaagcatgctagaacgcagttccgttggctaccgactgcggctataactacaggcacgtggccgtcttttcgatccaccactatatattctgctgaaccaagcccaacttaatcacgtagcttcttgacgtagctctacagctcttctaagcctcaatcacactagctgtcaacacttcactcctcattgctaagcaatgacaaatacggtccggctaatgtctgagctgccctctttcctgtatcggcgcccgtacgatggaggcaccgacctcgttcgtcagagcagcttgtcggtgtacagggtgtaaggtggggctgcttgacggcgggtggttgtgcacgagggttctatcgcgatgccgaattgcccacctttccgctccaccctcatcggcaatatgctccacgctgacctgcatacgacagccgcagcgacgagaactgcggcgcttgtcaggcccagccttgttgtggacgcgacgtgatccatgtctatcgcatgcaaagacgactcgccggcgctctcgcgtctgcttcctgaacgacgtgtgggcgctgatgagggcatacccatgctggtaagcggagcgattcaagacgtcctttgcttcctctgggctggagaagacagattcgttgaggcagggcagctcccattcgtcctggtttgccccgcgggctggcgactctgcgtcgagctccgttgacggcgcgcttgggcgatctgcaacgctgacagcgctttgtgaggtgacctcggtcggtagatttatcgtgcacatagctacagcagccagctcgacgccatcgggatgcttggcgacggcagatccggcagcagccgactcgaagtcaccgaggccgccgagctcattcatcttgctcgaagcctgcttctgtgaaggccaaattcttaatgctagtgtgagcagggcctcattctatagtcgaggtgcattattcacaataggttgtagcgaattgattgtgtggcggtctgcctgatacaaaccgttccacgttttgtacacttggcttcaatataggggtgtcggtcattagcgaaaggtgtactgttgctatcgcctccaaaggcataaccacatttcagacatgtctcaaacgtgtacacgtgagcttcctctattggaaagatgatatatgtccgatatacgtgaaacaacgttgttagctggtcgccggaggttggcagctcaacttcccatagtctccagcgccacagaaaatgaatcgtctcatgccttccgcacgtagcatcggattgatatgcgctgggctctgggggaaccgacactgcccccgaaacccagccacatcgttgaatgcttcggaaatcaatagcgccaggggcttgctggtcacagctcggtcccaggaaaaccatcatcggcgtagcgatcgccagacgctcccagcttctgttgtacgcgattctccaggtacttcacatatctttcggtccaagtgtacgtaactcttcaatcaaatccgccatttctatttcagtcggaaaccctcaacgcagctcacgtagcctaaatatccacacaggcattgccgtcgttctctcacagtcctgcctgtcgttgtcctctcatgcgtcagcgcagccatagccttttcgcgagcaggcgtttagtgtgccagggcagccacagtcgtcttgctaccggaagttcttggcgcgagcagaaatgaaaaaaaaatgcactttccgaccagccggatgcgggatttctcctcaattatttccgtgttaacatttcctttatcgttggaatcgacatggaagccatcggtgggttatctattgccatttttgtgtgcagcgatacggcccttcactcagcagacacacctggcgtttgttccgataggccagcgcaagagtaggccagcgtagtgcagctatttaatcggtgcaaacatgtccctgtagaatcagattcctgcgggatatcccggagcccgacgtagtaatgcaaatggtcgttggtacaacaaagtggtccccgcatgggcaagatccccacggaacataatcaaatttctgggatcgaaccttaccgtttgaagctatgaaccctgtgctcggtttccaatacatcctgggtagacgtgcaagaaggttgcgtccataagcgcaacaataaaagaagcttggacgagctcccgggtgagcattgcaattgcctttcgggaaatcctggtgtacaacccgcgaccgtagcgcctgtccatttttcacctcgacgaccccgccattgttaactgccgccaggacctggaccatgctggttcttagcttttggtttgcaagccagtattatcatccttactcccacaccgatcgttaatagtcttcagcaatcgttgacagaaatgcctcagtacaaggtaggaaaaagacaatcaatcaatcaaatgggtcaaacgaggccgaaagctcaattcatattatcgtaggttcttgctgcataatccaaaatcccaagatggacatcgatctcgtgtgtgctttatacgggcagaacagcacgcgtacagtgaaggttgcacgcgatgcaagcgcgatggagttgcggaatgcaattgctggtgagttgcgtcgggggattttcattgtgttgttaacattcttcttggcgcgcaagcacgacgcgtggctgtcggggcctcgaggtgaagacgcaaagagtggcgaaagtgatctgaactacccagttttcagcctgttcagtggcgtgggcgaccattttcccgttgatttaagtcttgcctaggagaaacccatgtgcttgtgaaagtgggttttacaaaactttcgctacggcctcccaagacattggtgatatcaattggagcataaagggactttcaaaaacatttgactcggatatacacggtgatattacgcccgaaatcataagccactatcgttcctggaatgatggaagtcgcgataagcaaaatcacccgcattttctttgcatgggagggcctagtagagggaaatgtcgggttcggacggagtttccgcgacttctgaaggaaattcttttcgattgcagtagttcagaaagtactggcaaagcattggtgaacatgctgcagagctcgttcaccttccacatcacgtatggtagtagctcggaaagacgtgatgcggcacgtttaattgggaggcggatgctgtactagctacaggctaaactggaatggagtcaattcgtccaagacccgacgcatcatgtgtttccagatgatgttatttcgctgttggcacgagtcagggacgaacctcttgaaaaaacatgcgtctatttgactgtggatggactggaaaagcttcattgcgatacaaactctaatgagtcagaactacacaacgttctacactgtgtttgcaatatcgtgaatgagcctaagtatttgtgtcattggatgcttcattgacggtttctaagccgatgtttgattctgtcgtgactcaacgtgttattcagctgaccaccacaacgctggggcgaccccagagccgagtaaaggatgtttttgaagtgttcaaaagcggagagttgatacaactactcatcgacgacggaagcaacaagtcctgcgcttcacgtgtgttatgggcggctttcgacgaactctggaacagctctatcgagttatggctgtttttgaaacgaaaaccccagttggtcctgcattggagcttcggctcgtggtttcagctatgtaagaagcttatccaaaaattaacattcagggtgaaggaataagagaagcgtttctagcggttattggtcgacgtgtcattttttggacctcccgttttgaagctactactctcgacgagaccatttgttcagaaacggaatatctttttttgagtgcccctacatactgaacttgatgattgattcgtcagctactctctggcatgatcccaatcagctcgtacctaatgaaaactgcgatgattgggcactgagagagatctggggacgtttttgttttcaacatttatgccttgaagtcgatggcttatgccaatgaccccttggtgagccgggaatacgtgcatcatggagcgcattttagtttggagtgccatcgtcttgtgaaaggtgttccccacaagtttttgttttaggctgcaaagcatacgaactcaagaagtggtagatttcaacgcgtgaaatgcaagtgtggtctaggctcgagtgactacgtgcttctatatcgagctagacccgacgagtcatttcggtgcgtcgaagacgtcaatagagggtattttcacgatgttcaaaggtgcatcgatggaaaacttatttcctgcgctgaaggctgcaaagatcaaggatgttggagaaaatgatatcctcgtgctgtattgcactggaagtgtgtcatgtttaggggccacagccaaagcttcagggtcggtactttcaaattgcgcaattgtttacattacttgttggggtgtgcactttggggcatttgttactagagcactgtttgctgctcaacagtccatgaaatcgcaacccgggcgtgaaaaggcacaaaattgatgtaaggatcggaaatcactcacatggtggaaattcgttgagctaagatcagaggaattaattgactagaacgctgccaggcggggcaaacgcctccgagatctttgggtacgtagcttggtgaggagatggagctttcacaagtgactcagtctctcctcgccagtaagtgccgtgcccccactgatcctacctgcattataaatagtctatgcttctgtatcttatcgaagttgggatccactagtgagacgtgagcataagaacatcgagggaactccgacgctcccccttcctcacgtcactagtacgaacatcgtagcacaatactcgagtctggatacgcgaacgtcgcgttatctgcggtgaacctcaccgctcgtcacacgaccatcgtgcactttacttcccgggtgaccacgaatttcgtggtatccatgacgctcacacaaacctcgcggcatgccatagctttgcgagaatcctcacgcgagacgctcgcgctcgtcagacgtgaccttgatcatcacccaagctgtagcagcttcagctggttgcttgatcccgtcctctgctcccccttgttcatcgcgaggaacaacgccaagtagggatcgaaaatactgaagtttgacacgggcgaatggcttcgtcaaaatgcccgctatcatgtgctcagtgccgcagtgcttcaccgataatttttctcgatcttcgagattgcgaacataatggaaccggttttcaatatgcttgcttccgttgtgcttgcccggtttctttgacagtgcgatggcggccgtgttgtggcaccaaagcgttggcgtgctgtacttccatttgagttcatcacaaagcccactgagccacattacgtcgcgggcgccttcattcatcgcgatatattcagtctccattgtactctgagcgttgaggccttgtttacggggaccatacgagatgacactcccgtttatcatggtagcatacccgctgacagattggcggtcatctttgtcgttggcgtagttagcatcgctatacgcctccagccacaccaatttcgcctctcctggatctccaacgaccatgcttagccccgggcgatccgcatccttgcagtagctctataaacaccacttcagatagtttaccataacgaaaagcagttttaacgtcgtgctgcagaattgaccacttccgctgcactgcaaactaaatcgccagtcgaatcgtgtcatatcgaatgacgggggcaaacgtttcgttgtagttcactccaaaacgctgcttgaacccgtgaattacaagccgggccttaaaacgcttcacatacccatgctcgtccttcttcacagagaacacccacttattggatatgacccctgatgtaccagcgcttggcgctcaacaacttgccaaacaccgtgccgccgcaaggattccagctcttcattaattgctgcctgtcagtaagccgcaagtagagaccggatagcttgcttgtacgttgcaggaatgggtacatcacgcgcatgtagacgatgaggtacttttagttcagccagccacgctttaaccaacttggttgacgcacagaacacctcacaaccatcaagacgagaacttcgcttccgttttcgacctgatctgggcactggatgccgacgaacagtatcactatcagctactgcagggttctgggaacttgagttaaccccagccgattttgcagccccattaacctccgcaattgccgcactcggagtggagcgggcgctgtctggtacaagtgcggtatcagagatcggtgcaggctgcaccaacacactctcattgactgcgtcgagcttgaccacatcttcaatctgcatcagcatcggaactaatggtgcccgagggggaagagcgtgatctccgtgctggtaagcattggacagcaattgctccacatacaaacgacccacagtataatcttcagtgaaaaccaaattaccactgcgatgcgtggatacagctcgtatagacagatccaaaactttgtagccatgcgtcgccggcgaataccctacgagaatcgaagcagccatcctggaggacaacttttttttcttggaccgtgacccgctcggtatgtggtagtagcacaagcagccccaggcccttaggcaggaaacgtcaggcttctcaccagacaacttctcatgaggagtgagtccgttcagcacacgtgttgccgtgacgttgagcgtgtagactacatgctgtgcagcctcaccccacagcatgtccggcatattcgtcatgtgcagcagcgctctgacctcgggcagcactatcccatttgcacgcttaactattccattctcctgcggcgtatagccgttcgtctgagtatagccaccttgttgctctcgggcttacacgggcggaaagtgatcatgacctttatgctctgcacgagagggggggatagtcatgctcctcaccatatatagatgatctcttgctgatggggagaatgttcgctgtgaagacgttgctcgcaaactggctgtgagtttggagctggtggaactcggcccggttaaatatctcctaggcgttgaggtcagcattgactgggacaaacggcgagttttctacagccagactagctacatggaagaagttctgtggaggtttcacatgcacgagtgtcacggatcagctacaccagaggccacaactgctgaacctgatgcagtaggtgatgctgaagcagaagtagctgatgccccttatcgtgaaattatcggagcactccaatatctcgtgtcaggctcaaggtcagatattgcgcatgtcgtgaggcgacttggccagttcctatcttgttttactgtggtccactttggccaagcgaagcgcgtgttgcgctacttgcagtcgacaaagcactgaaatcagcagatatgccgcctaaataagtcgctctacgggttgaagcaggccccgcacatctggagcaagacgttgccggtctgcatgtaatcttgcgacagcaaattggcgggggcatcagggagatagtaaacatcggaaagtaagcgcttcacttgctgacctgtcagctcgttgacgatataaagctccactgatccaacttgatttagactgaccagactgctgcttgcacaggacatcatagggccgtcgctcactgttgcaatatccgaaaaataggtaagatcattgcagacgttgatggtcgctgcactgtagaagcaccactcgactacatcggacttaacttgattgtgtgctcattgtacagttgccactagagctgagggacctggacttgcatgacgccgaccgctactgcctccatgtcgcggttgcgagcctccgttgccagaggaccccgagtgaccatgagctcctttagctttctgcttacagtcgcggtgccagtggcctagcttaccgcagttggagcagggcttgcgctgcattgctccctgcagcgagttccgccgatgcggcttgaacgacccgtgattggaccgatgccctcctccgttcttccgcccaccaccattgtcattgtattgcccactcgagaactggaaaactgccgtctgttcacgctgggcaggggcaggattctgctcacctcgcgccactttggggcccgacccacgcatagtctcttcttgctcgcgggccaagagtcgtccacgaacctttccgacttctaacacttcccgcttcatcctagctgccaccgacttgttactgagatcaggaaacacctccagcgagttggtcagcaacagccgagcgagttcagggtcgtcaacttcatagccgagcgtcacatcatcctgtggcttcatgatctcatcgatgaacgtatcaacgcgctcccccataaccaatttgcgagcaaacatggctgccttgatcaggatgtcgtttttagcggcactgccagcattgtactctcgctcgatttcctgaaagagctccaccgggtcacacttgagcaacagtcgcttgtaccgaccggccaaccgaggtcccagggagtagttggtccagccaatttactagagcggctgtattagcaatggctgtcgcttcatctggtaaaatccttatcgcggttaccgtccatttatttggctatgcgctatgatcgagggtttaacgttggagtttttactgtggttttttattagtacgcccatgtgtactatgcggggtaagacggtagagatgagcatttgcattttcaagtcgaaaattgctacaagcagcaaacagatctcatccacatgtctaattttgtaaagcattgccggttgatatctggtatctacagttttaaccttttgtctccaggtcgaatgcgtacgggtagcatggctgcaatcctacccgcacgcgcggccttcgatagtttaatataaaagtttgtatgaaattgtcatatgtactgttggtttgatgcactgcatcctagcgaccccgattaagatgcacgtatcttataatttgatgcatgcatcatattcatctcggggttaatgcatcaccaaagctatagcaaaaagcgcatttcaaactcaaaatatcatgataaattacgcttgagcggtttattgctctactttagcaactgaagcccgcggcgagtccatgcggggggggatccagaggattcggagagctgcaatcgtcaccccaatgagccccatcaaaaatacgtgcgtcactgaggcaattggattcgtctgtcagcatgtcgtctggcagcacatcatccgtaatccccaccaaacgctccatctcgcgaatactctcctgtacctcttcgctgacggggccatcggggttacgtggagcagaacttgacccatcgacaagatcaaccactgaatcaaaaattataggtcccactgcgtccttcagtccgtgattcgagtagataaaagccaacttgatcaccctgtcgttgcttaaacggttccggcgcgccgtatgaataaattttaaaatactccatgaccgctctgatgccgccgatgaagtcggaatagcgaagatccttcagcaatcggtgctagcagtggatactgatcgcgtgcttcccatgaccgccactttgacggagacgatctgtaataaatagcccgggtttcatcactccaattgattttgtgcgtcaaaaagtcagtcacctcgttctcgagcttcactcgcttcgcttcgttgtagcccagtaaagcagcaagcattgaaatcgccaagatagcgtcaatcttgcctgtaccaaccaaaaagctggtgggtttggtgtggtcgagcaaataggcaatgctcatggcagacttggggataaactgccaccgataatcaatccgcgctttgatatagctctggagatcatcttcaactcctggaacattggtgttgtacacaggatgccggctcaactccaaaaattgctgataaataacggaaaggcacagtcggtcgctttcaaaatggaccaggcacttgtgaattggctccagcaattgaagcgccactgcgcccttcgcccagaacacctcaggaaccacaagcagagctaggcgcgatattgtcccgctgtcatacttgtcgagaagctcctcgtcgttaaatatctctctgatcgctttctcgttctccattaccagcttgatgcattcaaacgctgagaaccaccgcgtcgctaccggaagtttcaaaccacgttggcagccatctcgatcagatagttggatagtacggaatcgtgagtttgtcgccgtgtgacttcgggtgaatagtgcgatttccttggcctcgttcaggatagtcttcagaatatcaaagccgagaacgtccttcatcagcaaacggagcccatgagccgcgcaacccgtagccagaaatcctgggcacgtttgttccaaaattgaccacgcgctgcgcatgttggaggcattgtcggtcgtgacggagaccactttgaccactccgatttctttctcgatctcatcgacgacatctccaatcatttgcgccatgtacgtcccggacttaacggcttctgcagtcacacgacaggtccaaagcaatggccgtatacccggagcaacgataatgaagtttatcagactttcacgacgcaagttggaccatccgtctgatacgagagccacgagcggtatatccttgagcgctgcgatcacatgttttctttcctcatcaaaagcacgatccagaagccattcagacaagtccttccgagttggcgcgcacacgctaaggcaaatacacgcgaacatctgccggaaaccaagtagttcagcaactcaaaatgccaccgacgttgtgtagaacatcatggctatagacatctgattgcgaagtgttcttgatgcgctggaatccgtttgctctggcgatgtttcctccaccactcgtccagcacagctgccttcggacgacgagctgcgagaccgcctcgccctcttcttctgcttcgccttcgccaaagcagcctccctgtattggtccttcaggaacgctggcatggatggacatttgatcacatggttgatcatcccccgcgaaggttacacccgccgcaaggtcttgttgcagtagttgcaggttgcgtccttgtacttgcagcgctcggtgccttcaacgactgtgaattcgtcccaaatcgaagcatttggccttccacgtcgtgccatgaggcacaacgaggttgatgccatcaggagcaacagcaaccacatcattgccggacggcggaccgatggcgggaaattcgaagtttgacggaaacttagaagtggctacatttggtgtgtactacactattatgatgcagaaaaagatgcattttgatgtaataggacgcagcgcatcaaaccaacagtagtcatatggccagcaaaaacaatacagggattatatgatccgagatttgacgatatttgcctacatttcttaggtattttgacgaaaacttcgctcgccattttagacgcgatccaagctcatatcgagtacctgcaaagtgtctctagctccccaagtaattatctttctaccctactaaccggtttctccgtagcaactctgtgtcgctcaatataacacttgggttggtgatttttggcgatttgctcaacttacgacggtattttcaacacgatgcgttgctcgaattgagccaagaaataaacttaggactctccaggccttcttcattatattcgtccaattcgcttgtcaatcggagctctgtggcgctcaaactttatttacaaaattgagcctacccgtacgcgcgggaggctcactatcctacaaaggttaaggccaatttccgggcagatgctgcggctgcaaagcaggcgcaggagatgcccgtagctaatatgaaaagtaatcattaacctttatcccctaattagcctactagtaggctcacaaaacaaataggttttgaaggacagagacaattatggagtgcgacgctgggctcaaagaaagctgaaataacaaagtacaacttagttagttttcagcgctaacagagcggtctatcggacgaaaacttcagctagatatcgtggtaaagttcaatagtaaagctaatacagcaaatcattaagctttatcatgtgactttaatgtttaccacatgatgtccaatacaagttttcatataaactagagcctactagtaggatatgacccagactactagtaggctttcgacctgggggataaaggttttaaaaataagagagtggttcctgttacagaatagaaattgataaacagccgctaacctcgctggccctaactgccgccgtcggtccggcaagcgtatagcgtttaccgcagtggttggctggtaagaatagtttagaaacggagcgttagaaggcaagaaccaacgagcactgcgaacgacgcgagtggcaggaagcggcgcgcagcgcaagtggcagaaggcagcgagcgatgcgagtgcgaggacccagcgctgctttcgtgaacgtcggtgacaaggtggtgaaggtattcgccgacaagaaggcggacaagctgcctcgacaacccatgctacgcgacgtggtcaattgccgtgcagcaccgaagggcaatggcgagtgtagcatgtttcacggctgtgttgttgtcttcaagtaagcgtcgaaacctagtgccgtaactgtatcaccatgaatccatgtacgaaagtttagcctcgttggatcttgttctagctagtctatcgcatgcgtccaagatgtagttatctaagtatttacatgtacatgtagttgtctagcgcatcagtcactaatactaggcgaagcacaggtgcaatatgtagaatagctatagtcgacagtgtggagtaaatggtggaggctccaccatttactactacacatagctccatcgtggcgctgcacttacaagccagttcgtggcctgctctcccgcactacaactaaccggaaacgtataccctagccgttcaggtggtacgactcgctctatcatgtctggatgctgtctggatgctgtcgtgacgttctggatgctgtctgggcgttctggatgccgttctggatgctgtcggtaactccagtctcgtctcatttttttcaggttgtaacagcaacaagtgcctaaaaataatgaggggggttatatcaaaatcctccaatcccagcctttgcagagccctagttagtttttggtgccacactccctttaatagtgccccccttgtattaataataatgccgcaggcagggggggtactgctgcaaattgcaggagtaccccatacactccacgacaaaaagatatggacaccaccaaaagtggctgtaacttcgtcatttttatcgttttaaggtgcggtttggactagagttgcagaacacgctgataaagatctgcacgctgctaacacgcgcgcttttgggcttcttcaggtagctcacatacaaatcactggttccgcccaggtgacaaaatttatggacagctaatcgccatacaaaatcctatataaaccaaaaccccttacaaatgatacgacttggactttgtatggggcgacaatggaaccagcctcacggggatactcgtgacgttagacaaagatctgatggcattatcgtgtactagaaggtgtgtttagtaacctataataaattcatcgaccatcgcacaaaactgagcaagtagtaagcaactgaaatttcgagtggtggctaccatgtattatctgatgatttgcgaggcacgttcagttgcatcctagttagtgccaatttgtagctctgtatgctgctatctcttggatatacgattgtcttctccattctgaactgctggtagataatatatggctcagtactaaggtagagtggagaaatcatgggttcctttgtcgccccatacaaagtccaagtcgtatcatttgtaaggggttttggtttatataggattttgtatggcgattagctgtccataagttttgtcacctgggcagaaccagtgatttgtatgtgagctacctgaagaagcccaaaagcgcgcgtgttagcagcgtgcagatctttatcagcgtgttctgcagctctagtccaaaccgcaccttaaaacgataaaaatgacgaagttacagccacttttggatctttttgtcgtggagtgtattgtattgcagcctgcaataccccacggggcataattacagtttttggagtactattctgtccagtatagaaaaagttgcaaaatttacaacttaaaagtatttagccccaaaatgcacgacgccgagcatgtgggcgagaagcggcgtcgtggcgggagacggccgagccccgtgtgggccttcttcagcgaaatccggacgcccgacaacaaggtgcacgcgtcctgtaacttctgcgccaagcgctgcgccggcgtggcctcgcggatgcgcactcacgtgctgaacaagtgcgagaaggcgcccacggacatcgagcggcttctggacgaggccaacccgcccgattcacgcagtgacacattccagacgcatagtgccatagtcatcgccacagatttacccatggagactgccattgcctcgggggctggcgcatctttcgtcgacacggcgtcaccagccccggccaagaggagacggccccagctgcaacagaatcagcaagttatagctccagttgaggagacaatcagacctctagtcactcatgacgaagaggaggacgcgggggagattgtggcgacgtcggagcctgaaagtgaagacgctgaagctgaggttgaagctgaggaagaggaaagtgttgcggcgcctcaagtgtcttatgaacccccgcgagctcggttagaaggttactcggagcaggaggctgcccaggtgcaccagaagctggtgctagcctgtgtactgaatgacgtccccgccactttcgtggaagatgacgcgttgatggaagctttcacgttggcgcgtccgggcttaccgcggttatcagcagagcaggcgaaaaccacagtgttgcaggagctggcggatgcggcttcgaagaagatggaggaggagttggaacggtgtcaagtgctcacgcttgtgcacagacactttaagaagcaggatgaagcggcaacaggagcgccattgaagtggtgcaaccggtgggtgggcgtggatgaacagcgcagggtggttccgttgaaggagacgcttcgcaaagtagagccgtcaactctgtcgtcggacgaagattgctgcagatattgctccccgcgtgaggagttcgatgtagttgtatcgagtttacgactcagcatggcgccggaggctgtgttttgcctctgttgtgagtgtccactgatgtatcgtcagctacggctagagcagcagcaagctctatcaacacctgcccaagaccctgacagtgtcagtgccattgccaccaagttaaagacgcagatgctgctgagcgcgtgcttactccgccagtcgctggtcttgcggaaggagctgctgaacacgttcccggctcttgttgatttactgaacaagacgatttttctggctcatagcatctcaaagatcacaccgctgcggccgcaagtggaaaccctgctaaagtcgtcaaactggggcgctgtccccaggttggtcaaacgtatggtgtttttggagaaagacgtccgtcggtatcaagccaaggtttctgtgccttccgatgaagtgtcgtcgttttggaacaagttacgtctcgtggacaagctgctgaccccgtttaactggatgctggcgctgagtgaggccaagggaacgacatcagcgcagtacgttgtgctctggctgtggctattgtcaattatcgagtccgccacttcgcagttactccccaaacaggacaaagaggcttttacagcgactgttatggcactgatcgagcaccacattgactcccacgagttggtttgcatgctattggaccctcgcatcgctggtgctgggctttcaatctctggtaagcgacgcgttaagtctctggtcgtccagatagcggagcgcatatttcccagtgaaggcttcagcagtggcgctgctcgcactcaactgctgacccagcttggtgactatacagagaagtcaggcggcttcgaggacgtggtcgcgtgggaaatgagtgcggggcggccgcccaaactcttctggaatgacttcgtggaggacgccccgtatctagcgcgcgtggctcgagccgtgatctccgtctcaccttgcgcgcagacagcgacccaggcgttggacccgtcgcccccgactgaagagttcgcgtgggagcagtcgtttgcggtgcaacagctgaagttccaggctcaaaagctgccgccccagaccgccggtggcgtgcagcagtaccagctgctgctatttcctcctgctcccttgcagggtggtatgtctgacggcacgttgtcctcggaggtggataaggcacttcgagttaacacgccgcggtggtcagccagccttgagaccgaagtcgaagcctacgtcactcgccagctgagctcaatgctgaaggtaggcggcgaccacgagatagaccttctgcctgcaaccacagcagccacgatgaccaaaggcgtcgggctctcgtggttcgcgttccagtcgccttccgaccgcaaagcgctggagcaagccgttcgaaacttcctgccctgccctacaacagcagccagcatcgtctaaggtccgcttcatgttgtaggagagaagtgccgtcaatgctttgaagttgaagccatcctctcatacgcaatctgattggctacatccatttcagccaatcccgtctgcctaaagctgcccatatcttttcctcttctcaggtctaaagatcatcactcatggaggcggaggagctggacccggcgcgcgccgccgccggcgtctcgagctccagcgccagcgctggcacgagcgaccacggcccaagcgaagacgccgccaacaccaacgccgcgcaggccgaggcgccgccccgcgtggaggcggaggcctggggcacgggcgacgacgaggacggctggatgcccaagcccgcgcgcctgcactcggggcgcacgcgcagctgcgccgtgtgcttcgcgtcgctgcagtactcggcggccgcaagctgggacgagtacctgcagagcgaggagtacctgcgccagctgcaggccaacgtgctgcaggacgccttcgtgtcgtcgctgctctgcggcgagaacgcggcgggcgacctgcccacggagcaccgcatgcacaagaaccgcaagctcaagtgccgccaaagcgtgaccgactaccgcaacatgacgagcgcgggcgtcgtggaccgctcgggcatggagaagggctccatccgcacgctcgaggagatgctcatcgaggcgctgcccacgcccgtgttcacgcacgtgctggagcgccgcctggcggtgatctcccacagctccaagatcgcctgcgagctgatgagtcgtgatggggtcaagaagatcccgaggcctgtggagagcgcgcccggcaacgaggagctgcaccacttggctatccacacgctgtcggcgctgctgggcgcgttcgactataagaacccgcaggctttaaggccgttccaggagctgtcgcagctgctcacgtgcttccccgtgctgtcgctgtactcgttctggagcccaatgaagaaggcgcccgataaggccttgctgctggacaagcaccaggtggaggcgtcgtcggtgacgtcgagctcggacgcccatggagcgtactgtgccatggatgggatggacagtacgtcttggcactcgcagccgaggcccggcatggtgtattttgcggtgaagtcgacggagttggccaaagtgacgtcgatcgcgattcattggcatatgaagtatgtcccacaaacggtcggtgtgcagtatcgtgttgaggggagtgacagctttgtgcagctggtggaggaccgagcggtgacatcctctggtccgacggtctttgacacgagcttcccgccgtcgtcttgtgagactcgagtcgtcatgtcaggcctgccatcctcgaatcgaaatggggtatatgcgattgagcatttgaagctgaatatgcctgcccctggctccttgtttgcggatccaaagtcaaccttgaatgcagtagcgctttggttgcttggagctctggacgttgctgatgaagttatggcggcagaagctatcggggcgttgcggtcctgggcattgtctacggcgtcgcttagtgtgacaatgttatttgttgatatgctgctgcgtttggaaggtcaggacgagaacggtggcagcaaccgaattgcatctttggcgttggatcaggggcatcttctttacaagggaataaacgcgtatcatatggaagagtcccagcgtctagcaagtgatggagacaaggttgcgtttggtgatgtgcgcaaagttgcagcgactttcgagtcctcggtgtgttcgactggagtaattgtcgaggatggaggcctcgttgtccgtacacgggaaactagctaccagtatgctgctgtgaattgtggtatctcgtccgggaaagcttcgtggaaattccgtcttgacacagatacacaagacgacgaaatgacttgcttcggtgctgctatacttcctgtgactgtgagtggatacgattcgtctccaagtctttggatgctgcgaggctacaatggcaatctctacgcgcgagggcacaagcttagcagaactatcggtaaagtacatccgggtgatatcgtccaagttgatgttgacatgggcgaaggaacactagcctacaaaatcaatggcaccgattatggagtggtgtttactgatctcgccggccatgaggtacaccctgctgtctccttttacggctcggggaaagtaattaccttgcttggagtcactaaatgggattgcactagctctggaccagctgatatcgatccggttttcctttcaagtatgagagagtatcacttctcggttgggtacggaactttgggtaaaggtaatcagcttggatatgcaagcaatggggactcgagctcttcgcaagccaatgcatctgcgacaggcagtaccacgatccacgttaatggcgaggctaagcagcgttgcttgtcgacacacccgccttcgcacggcgatgcctacgtggtctatgatctggctgaagcataccatactattagtggtggggttgcatttaatgacgatacacgcaatgagttcctcgagaacggtggcgtctcgttgatcttcgaggttgttggagatgacaagttgctgtggcaatccaaaccgatgtctgaaacccgtctgatcgagaagtttgaagttgatgtgaggaatgtcaggatgctggagcttaaagtgtcgtgcattggttcaaaccattgcgcgcacgcagtctgggttgacccttgtttgcaccctgtggaagagtgggtttgcacacagtgcgctttcgtcaacaaagcatctgcagaaatgtgcacagtgtgcagaattggagcccgtggtgaaaccttggatccagttaagcagcctagctctgaagaagaaagtgatcaagcttctcaagcgtgtatgacgagtgaacacgtcgcacaacatatgcgctcccccggtgagctcgggacgacaattattcggcaaatctacgatttgtaccagcttcagtgggaacgtacgggctcgacgctttcgacaacgaaaccatctgttaagtttgaggaaccgttttgccgacaaccatgcaaggaggtattctcgcaactgttgacgatactccagcgattccgcgctcaatgtgttgattcaaatgagcatagacagcatgcacgggatgggtgcgtgcacattcttgggattatcagtgccaatttggagagcatttcatgccatgacgtgaaggacccttcaacagaacttggcgtgtcacccgaactggtcgctagtctgcgaggggaacttgaagcaatggcgtgtattcgtgaggaaagtggtgctgtcggtacgaagttggcggaggatattgaaaaggctgctgctcggactatcgtggccgggatatccgttttatatccttcagcgatcgagaaactggagctgctccttcaactgttactcgcctacattgaccatccgtttgaaatcacatcagcgagctatttcgtactgacgtcggtggtggagctacttgctgcgccagggccagacggaatactaacgttcatgccgtttatggcagctgagactgacgaggcaatatggccttctgctgtaacaaaaactgtcgggcttctgatgaaactagtggtgaattctcacagggggcagcttgccgctgatgctgatcgctctcgtaattgcgatgggctttctgatgttgctattcgcttactgaagacgtatcagctttatctcctatcagaagcggttgagctgacaaagacaaattctattgaaaatgacccagccagcccaaaagactcgaactacctgcgagtaatgttgcatcgaagacttcaagttcaagaagcaacgatccagtttggttttctttcgttgaacgcttatcgagatctgattgacagcattgccggatttcaggcggaggagtcgtttgttctctcccgggatgcggcagttcgccaggcaagcgttcgttcatacaggatccctttgctctcagaggttcttccgtggtttgtgtcctccttgtgcctgctacgtcgacagacatggctcgctcggccaatcctaccggctatagtccgacttctcgaaacggtggaccactattgctctgaatcgcaaatcgtcagtaagtcggcgcaccgattccagcaactggaggcccatcaaaaggcaaggttgattgaatcacaggaagttgaacgtgctgcagcgctggaaagagacccgagctttaggtcgcacacatccaagcgtctctataatgtgttccaccagctctacaccggcgagaaagaccacttcgagggtcagatcgggtttcagtttgaagcgacgagctcgttttctattgtcgcactaggacgctcggtcaatcctaccagacacggtggcagactaacgcgtgaacatacgatcaggttgtgggaagaagggtcgcagcttcttgttgcgcaggtgacagtcggcggtagctccaaaaaggacgcacttgggtatgcactggagatgctaccaacacctgcgaaaatcattcaagggaagctatatcgattgacgacccaggaatttgcaaacggaggagatccatggtacaagaaggagaacttgccggacgaagaatacgacgagtcgttcatcaagattttgcgcgattgctatgcctcgggatctgttgggtttccgggctctcaaaacatgatgggggcagcgtatggtgtaccaacgtttatggtgcaagacgaaacacctctggctagccttccccgttttgttcctccgcacggatgcctttcacttcggttcaacgcgaagaggaaattgaactcagtttgcattagccacactggcacttcagcttatgtgaaagatggcacggacacttggcgaacttgcctcttgagaacggcgttccttcatggcgtgcattctgttgatttcgctctcaagagctcgcgcgctggtaggtccgtgtctggtcacatttgcgttggaattgactggagacagccacgagaacaaactcgtttgagtgttcaattatccgcttatgaggcgtttatgggggagacggcgacaagtattggatggatgcctgctattggtgctgtctgggtgaagggcaatcgctacgattatggcccaaggctttcggtttcggtgggcgatatcttcacagttacgatcgactacgatttacaactgctggcgtttgcatataatggcaagaacttgggggttgcagtgggacctcaagagttccgaccgcttggcactaccattgagggacttccacaagtggtaactgcaggtgtatcgctctacggctctcaagatgtagtacaagttcgcccgtcggggattgcaaagtcaacgctccgcattcactggcttttcgatttgcacaattcgttggcctccctggctgggaggataactagcacattaattgctggacatcccgtcgatggtgtggaagaggagctattaccttggctacagtcgccgctacttagcgggggcattgctgagtccccagcaggattggatcagtcaggtgccaacacaccattacgctggaatgatgcgcttcaagcagaatgcgcccgttacccttctaatgaccagggagctggaagtggtgtctttacaagcatgacaccaaatgctccatctagtgttgaaaaagaatccattctgagaaagcgtgtttcgggagggcgcttagatgctgttgaaggtgtcaaccagcgtgatccaactttttggagcaattggacaatggatatgacggaacgtggaaccgtgcagctgataatgtcttggttggaaaagcactgtcccgatcgtacctttatgagccggcttgggaaattccctgcgtgtgagcgatggatgtgcgcagctttgatcatgcatgctccactccatgtgatccaggaggtgcaagcaattgctgcgggtgctggcgcaagtgcggcgggggaggttctcggggcggagttcttccttgctcatgcgaatttaactccgtccgatgatctggttctcgtttggaagcgtatattgattcttcgtcactggctgatcaaggctagacaggagtaccgagcgaaagaagcagatgatccctcgccaaacgaacagacaagaagcgatattctaccagaacaggagtcaaagcgcttgggtgatgatatcaacttggaacaaagcgtggttgtgccaaagacgtttgacgagctcgtccagcaagtggtgcaccgagctgagtttttgtgcaaactagcgccaccgtcagaggaagtcgagcggcttaagggagactcccaagtggcgttgttcaacctggctgaaaaatggagtgcccaaaagacgcctccttccctacaaccgatgcttgaacgatggaaaacgctaggggaggcagatagttcgaaatggtctggtatcgtggatgtgctgcgagctcaacatcgttggagagctcgtcgagcctccatccaagctcttgtcatcccaacatctacactggctccgagtgctacccaacaatcgactgacagtgacgataatgatgacatcgacccagcagaagacgtgactgtgagcaagaaatacgactacacaagcaccttctctgcaatgatgaaagcgtgtgaattgtacattcgcgatggtaccggagctccacctgaagtcctagcgctgttgcttgagagacgacagcggcgatctgattctcgcttgttcggtcttcaagcgatgaagtgcattatatcgttgctttcgtacgactcggccatccacaatgctctgatctttttgcgtcctgccatgagagggttcaccgacagcgagaaggagtcacgcgagctgaacgacgggcaagttgtagcggagacttttcgggctacagtccgtcaccattacttgaagggtctagaaggctgcaatcgacagactatcgacagcgttcaaggcgctttctgtgatttatacgcgtatctggctcagttgctgggagggagctccggctatagtgtgtctgatccgcagctgaagcaaacgattctgtgcgcgtggagtttggatttcgagccacgagaccaccagttcctgctagatactgggatgttgtccaagctgcaggaaatattctccatcagctctgttctacgagaggcagttgctgacagcaactgttctagcagtaccgacaatgtttcgacgtctaacaatctacgccagtactcaactatcaactggcaccccctgccagaggaatttgttcagcaaggactgttgcggagcggctacatgactaagcgcgacgtgattcgtctgcttcgccgggctcctcactatgcctgtcctgcgcaatggtggaaaaagaacgatttggagggcgcgaatgatgcggtaccaattacatcacgccacacagcttcatcgctttccttgctctatgctgatatgctggctgggctccaacggaagctgttggggcctccagctcgtgcacccagctctcaagcgctgctctttggcgcgaagataacaccagcaaccacgcgtggtgcacaagcggcgacaaacccaaaaccggacgatgttagctacttggagatgccagctctgggcgagacgaaggacttcacgatggaaatgtggatcaatccaaccgaattgacgggatgtcaagcattgcgatgtgataatggcatggaaagtggcagtgtgtacctggagttaattggccgacatttgcaactatcgattccaggcaacttccctcgcgagcggctgtttagatcaatccagctccgcacttttgaatggacccattgctcggttgtctatgattcaactgcacgatctgttgagctttatgtgaacggagtgttctcggagaagatgaccttcgagcgtgtctgtggcaacgtacatttccgagctgctcggctcggttgttggatgagtggtgttgacgcgcaaggtgcagcgctcacaaacatttcagctcaacgcaagttcaagggctcaatcgccgaagttcgaatatggagagtttctcgcaccggctacgacattctacataactaccagcgaagtgttccactagtgaagtcctcaactggtacggccctgacaaaatcacaagttttctccgagaacttgatcgggctgtggcatgcaacggaaggagaaggcatctgcgtctacgattccgcgcctgttctgaaacacgcgaccgaaggcccagacgctaggagcaacaacttaacagcatcgcactgccgctggattcctacaagtataccagtctttgggaacgatactttggacagtttgcagccgaatgtgtggagtagggtcattgcatgcattcgatctttccagcgaaaagttcgattgtggctggcgaagcagttcgatgaatcagccagcctatcaaagctgatttgtgagcacgatgagcgcgccgctcttcaaaagtggagtcagttgtctcgagtaggggacgacgatgatgaaatggacttgtcagatagtgacgatgcctacttgagtggaggagaacttccaactggaagcagccagccattggatacggctgcaagccaactgatcgcgcagtggagtgcatgcaccgatgaacaaatgattattcgcaagcaaactaggcgatgcgcgtgggttgttttccgtttcttggcgtcgactggtattagtggagcttacgagagacgagagggagaagcgaagtctgtcgcggcctttgcgaagcaaaagcgaaaacagcgacttcagaaggctggtagctccggtaatgtagctgttgttgctagcgcagagacctcacgccctcagggcttaagtttcatggaagaggatgcagctgcccgttcagccgaagctgccagtgatgcggcaaaaagcgcagctactaacagagagctggaagagcccgttcttcagacgttgtggttctcgaaagaattccatcgaaaagtatttgaggttcttgaaaaggagctgatccaaggcaaagaactgacagaagaagctgaagggttgacgcgtgctcagcgaatgcttcgttcagtatcgaccccggtccaaaagcgaggtgcaagtcttcgtcagtatccaagcgatgtagctcgtggaaaatccggctttgttaacatccatcatgccccgagcgacttgacgggagacgtcgaagttctggagcctctcgaggtggagacgcacatgttcagtgtcctgttgtttatgctttctcagagccagcaatctccggcgatcacatacctagtacgccctcacatgctccgagggttgctagaaatgctacggctggcatcacctcgatctcagcgtgttgtcaagctgcttctccgcagaatctgctgcagcgggagtgtcaagccgtccgacgtaggtggcattcttggttctgagtccgtgctgattgatttgctacttgatcaagtcgccgagtctgtgtgtagcacagctgcaccgatgccaacgcacgccgtcaatgtcccaccgagcagtgcattagctggaacgtcggaccgagagatcacaatggcatccgcagagtctttaagcaaccctattgggttccgctcgggtcagatctcactggtggtcgcttcagagagtgtggcgttgttgcgtcggctactgatggagaagaagtggcagcagggggttgctgaaaatctatgcaacgctattcgcaacatcgctccaattctagccaggaagaagtctggcccaccgtctccgggcgtaagggcagccccagatccatcggatataagattccgagcagcaatcattcgtgctgtcggagctctgtgtgtactcggctctcattcggattgcgtgcgagtcggtggaaaagttgctgtggctgcacagggtcctaacagtacgagtgacgtgagtgctgatggcagcggccaagcagtaagtgcaacgctaattgagatgaactcgcaagcttcgactgttcgcgtggtgttccaccctacatcttcggaaatcgatttcgaccccagtcacaacattcaagacgtgaagctgtcggctgtgtcgcccactgaagaaatttgtttgcctcccacggcagtcccgctaacaatggacatgatgccagtgattcttcagctctcgtccctggatgaaacaagcgtcttgaaagagttcgatagtctgtggagacttcaaattcgatctcgtgcgctgttggcgctggaagctctgctgcgccactcgcttcaagttacgagaagcttcgcgcatgacattatggcgcagaatctgcttcggttcgctctcacacccatcagtcttaacagctttctaagccttccgctgctgcaggagcgagggcgaatgattttgtgccgcctgatagagtcatcaacgccgttaggggaagcaatgtttcacggactacaggatccaaccccaccggccctcccagcgtcagattcgacggatacttctggtggtgttgaagctaacgatgatcctgctgaggaagaaaccgaggcgcatcgggttcgtaggggctttgcatccacgctggctgcgatgggtttcgagttcgacttatgcatggctgcactcgaacattctcgcgatgaccctaacttggctgttgagtggctgatgggggacggagcagctacctaccaggaacgtcaacaggcgcaacgcctagcacaggcaactattgcagcgcacgaaatggctgatggtgctgaaggatccccaggtctgactcttgaagcaaaggcatcagaacttcagaatatatccggcatgccttactgtttggccttctgcgccctggagctctcgaacagtgaccccaatcgcgccatggagtggttaatggagcacggaagtaattacgcggagaagtttgactctctggatctcctgacggactcattttctgctgcgagaaccgtggtcctggaagaccgagcggctatggaagagattgatcaaccggacccgctagttacaacctccgatcgacgtgacgctattgctgcggagtatttgggctcggctgcatcgtccagaagcacggatctatcatatgctccgaatgttgatgcaatggcggtgactctagctccaattttggcgcccggacccgccaaacccgcatcgggaatttcagcatcgcgggattcaagcctgacagcctttttgccgcttgatccagagtacttaacgcccaatgttctcttgacggtaaccagtgatatcggtcctgttcagcgattagctactagcgggcggactggtatcttcaggcgttattcaccggacgacggtgtgctgattactttcttgaatacggagtctggtgcgtatgaagacgagtggcattttccacgagatctacgcagacttgtgaagatctacgacgaaccgctggagggggtggaaagcatacaccgtgttgctctgagaacggaaaatgctctctccacgtattacgctagacgtgcgatcacagctttactctgtgcattcgattcggctgggaagtcgacagcgaatgcatcaagaatcacctctgacgaggcgcaagcgctcgaagacaagccaccgtcgctgtcttcatctttctcgagtgaaatcttaagtgtggtgggtgggccgcggcaatttgtaagtcttctcaaaatggtggcagcctctgaaatgaactcgacccagcacgcggaagtggatgggaaaagcagtgctacaactggagcttcagccaccgggggtagcgcgtcgggtgttgatagttcggaacaaccaagttccttattggcaagtcttcaggctatcacgctgcggatgctgcgtgaagaagcgcgcacggaaaagttcgagcattctgaggcaaatccacccaagccgcgccctggttctccgaaaagagatcaagcaagtgctcattatggaagtatttctgagtctatcagcgaacattctgttgttcctgaggtttatgactacggtgaagaggacgaggatgatgaggctttgaaccgagcaattgcaatgtctattgaatctgctcagctacctcctgctcctgcagcagccatcacacagagcactgatgcggactgggctagcgaagagagcaagggtgaagacgctttgttcagaatgagacggacccgccagccgtccgataccgaggcgcaagaagttgctagcgcctacttaggaggcggaatcgatgatcataatggactgctgtcgagtgtgctggttaaagagtgcgtcagtcacttcgtcgagtcaacacgaatggcaggagacggcgcaggcgaggcagcagtccaagaattccagtcgttgcacccgtacttcggacgatgcgaatacgctcgtgctgtgagcatcgacagctcataccgatgcttgcggatagtgtttgatcatcgttgccgactggggcccaaggcgaagttgacgttctatgcagacccagagtgtgagagccggattggtgtggtggataacgccatgacaacttcaggccacctacttccggacttgatcatccattcacaccaattctggttccgctttgccgcgtcagaagagaacgtcacgaaagacaacggatatgggtatcgcttccaggtgaagccaatggctagtatccgctggacgaaggagtccgaagtgcttgcaagcccctcgctggaatgggcatgctgggtcctagaacttttgctgaacgatgcgacggagatggtaactcacggagctgtgcacaaccgcaaaatctacggcgcacttgtgcgctatctgcgttctccgggagctccgtttaagggacgtgttgtgcgcctacttcagcagttgttgcaccacccagagctgttccccgcagatgaaattcctgaacttgatgcactcgaatcgatctcgaggctcgcggtgacacgagcagaggtggacagagcgagtggcaaggtcttcctatcctctcatttactgcagttggtggagctatcgatggtgatttcctcggcttcgtcagtttttgagcgcaagctaaacggttcggctgcagcactggcgccacaagtaattacacccttcgatttacctgtgcctttcgagcggaaacgcgtgcgcgacagtttgaacgacgtgtccgaattgacaaggttccttcttgggcaaaccacgcgtcttcctcagcacattttggttgcaatttggctggaggtgtacgggtcttccgcggtaatcgagactgcccacccgtacactcctggggcggcgctgacggggcacgtagcgttcgatgctgcccaagcccttcgtattacgttcgactcgcgctgttcacttgcgcctgggcaaggccagacgatggcgaggctggagttggctagctttatgcttcttccccgtgacgatggcaccggtgatgtcgtaaaggagtttcgcagcaaccggacttacgcgggagaaagtggttggcctgaggctgccatttctcatgaaggcaacaatctggagtacaagtttcacgcggatgagaacgcaggcgctcattttggttttgccgcaacagtgaatgcgctgggtattccaaaggaaaagcaactagctcgcgcgactgccgatgacatcgagcagctcctccaaagactcctactgatgcagacagatcctgcaccggagggtgatcagtggacgcacggaatggacttgcagctcgtggactgggtgaacaaccatgtcgagcctgcagcgtcattaccgtcatccacgcccgcgacaacgaagcactctgttgatctgcagccagcggatattaagctaaaccaaacactggacggcttgcgctgctcgctgttgttggggctctcgctggagttgctgcagcttcgtttcgccttgttgaagtacctgaatctgagcctacagcactgcttgccgctgctagatctgcgtgataccaagtcgccgtggaccatcgctcaccgactgcggcagctgagccattgcattttcttcgacgtgaagagcgcgctagtggaagccgctatcgaagccacaaacgtcgccggagaaacctctgggtcaagctcgcaacagcagacggcgcgtatcacgctggatcggatgcaggcactcgaatcgagggatgatcgcgaggtggagccgtctgtgtcagagtgtttcttcgcccaagcgttccgtcagctgaaccaggtagaccctgcactcttacggcggcaaatcgacagcaagggccgacttttcagcgtcaagttccgcggtgaagagggtgtggactggggtggagtgtatcgcgagggtgctacctccatggttgacgacttgttctcgccgcacttcagcttgttcgtcctgtgccccaacggccagcacgacacgggcaacaaccgcggaatgtatctgcccaaccccaagtgtacctcgcctgtggccatgcaaatgtttgctttcgttggtcaactactcggaatttcgctgcggacgcatggcgattttcctttcatgttgccgtctctggtgtggaagcagttgcttggacaacccctcacgcggtccgatctggagggcaccgatgccatgttcattcagatgctcgatggaattgctaactgtgagaacgacggtatctccacggaggaagagttcgctacagccttcgccggacttgagctgcgctttactgcctcgtcgtgcactggcgaagaaatcgagcttgtgcctggaggccgccacctgactgtaggattctacaatcgacttgagtattgccgacttgcagagcgtgctcggctggaggaatgcagtgcgcaagtggccgccatggctcgcggctttgctactctgttccctcgacgtgtcctgacactgctgacttggcaggagcttgagatactcacgtgcggctcgccgaagatcgacctggatctgtggcagcggcacacgcgctacgacggctacgcggaggacgacccgacggtacagctcttctgggaggcgctggcggagttctcggacgagcaacgagctgactttgtgcgctttgcgtggggccgaagtcgcctgccgagaggcaaatggccgcagcccttcaagctgtccaagaaaggaggtcgggacgccacgcgcagcctgccggtcgcacacacgtgcttcttctcggtcgagctcccgccctacacgtcgcgcgagaccatgcgctccatgctgcttgcgacgatcaccttcggactgggcggcatcctcatggcttaagagcggcgagctggctgaacttgtatatttttcatgtgtaatacctgtatatcgatcaatgggttgccttgcagcaagtaagcagtggtcgttcacagacctgccgctaggcacacaaacaataaccaacgagcgcttacttcactcactctcgcttcatgtttgttggttttcttcatctgctcgggtgggtagtttgaggtgacaatatgtgtatctgtcgcctccgatgggcttgctgcacctcgtagcgcctccaaatttacacgcgcttgaagttctcaaggccgctgcctacaatactgcagttctccaccttcatggcctgctgcacggcctcctcgctgaactccgtggagggcagcacgacctgcgagctttgaccaattgcggcgaacgggcccagcgaaaggccagcctcctcgcccgtgagcaggatcttgtccgacgcggtcaggttcaggctgcaagcaagcaagcacaacagttagtgacccagccaccaaaatatttcccgtctgcgttcgaacgaacctcttggcgagcttctcagcgcgcttgagcaggtcgccgtgcgtgagcaccgcgctcttcttggggttctgtccctccacctctgcaccaaataacaataacaaaaaattagccaccacgatcaacgagtaataatagtctgcagccagcgaacgcactcgagtacgtgacggcgagcggcgtcttgtcgctcagcgtcttggtcacggccttcatggcgtagggctcggcgttgttgaccatcatgccgttgagattgatcatgccctccaccggctcccagctcgtggtgatgacgctgtgcaggtggcggaactgcttggggcggaacacctccatgcgctcgcggacttaacagtcataacaacaacaacaacaacaacagtctccatcagcctctcaccctctatccaacgctccaagcaatgcagtctcacaggtggcgagctccgggaagaggccctgcacgatctccgtctggttgcggcccgcctgcttgggctcgaacacgaggcccgcggcctggctgtcgtgcaggatgaaggccagctcctcggcctgggacacctccggctcgatgacggccagcgtgaggcccgcgcgcgcggccgccagctgcgtgagaacgttctcggcgctgttgggcagccagagcgccaccacgtcgcccgcgcggaactgcaggtccaggaagccgctggccagctcgtccacggccgcgttgagctccttgaagctccagcgcacgtcctgcttgacgctgcgcagcgcctccttgtgcggaaggcgcgccacggcctcgtccagcgccgcgcccaccgtgctggcggcgcgcgcgcccatggctgcgcgcatgaggcccttggagcgagcgagagcgagcatcttggctgtgtgtctggtcacccccggaatgccgaaatgagcggcccgcgcggacgtctaccgggtagtcagggaggtagtcagctaagtgtgtattctatgtggaccacgtgatgttacccatttttgctttggataaaatgggctcattaattatagcaggaggcacgaaggatgctggtgcccgtggtggtggacgcggcggcgcgcgagtggagtctgctcgagttccagggcgacctgctgcccgcagacggctcggataagccggacctgcgcgcgctggatgtgggcacgctgcgctacggccacggcggcaacgagatcacgctgcgcatcggcaaccacgtgctggccgggaaggtggccaagctgcccaaaccgttcgccatcctgcagaaggacggcggggacggagacgccgtcgtggctggagaccaggaccaggaccaggacatggaccaagccaaggccaagcagaccaagtacgaggtcgtgggcgtcgcgcgcacgcgcgtcgtgttcacgacgagacccaagcccgtgctcgggtagatacatgtagatagattgtacgataaagctcacacgggatgaacaatgcatcagtgaccatatataaagcatttcgttacttgtccttcacctccttcatttctctcctcctccttccctgcaggcaggtatcggtaggcaggttggtgtctgtctgacggctgctcgtacgccattgttacaatgcctgcgagccgttgagtgtccggcgggtgccgccgttgacgttgaggccggcaggggactcgaagttcgagtagctggcctcctgcggggtcagcgccgccgccgagtagtgcgacgacgagcgccgcacctgcgagcgcaggaagctctgcgagcgagacacgcgcgccacgaaggacggcgcgttgcgcgcggcctcggcgtccttgcgcatcttcttctcgctcttgagctcgatggcgccgtacttggagctggcgcacacgacgaacatgaagaccgtgagcagcaggcacaagccggcgaaggccaggtggctgatagcgaacgacggctccgccacgtagatgccggcctgcacggcgtagtacacgacgaacgacatgatgatgtagcggccgttctggtagggcgggaacacctcgatcgccgtgatccacgtgccgcacgtgagactgagcgagccgctgacgaacacgaggaagaccaggatctgcgtgatgacgctgctctcctggtcggccaggcccatggcaccgcacgcgagcgacagcgcggccgagaacgggagaatgtccttgaagatcgtcttacggcgcaggttgtcgaccgtgagcaggctgagcaccgcgcccacgaacgtcatgacaccgtagtagatctgccacttggacgtctgcgcgccagactggctgggggacggctgcacgagcacgcggtgcagcaacgcgccggacgtgaacagtgcgaacgtggcctggagcacgatcaccagcacgatacggaacggcatgttgacgcgaccttgcttcaccacgaacgagtccttgagctcactcacttcctcaatcacgtcgtgacgctgtcgcaggcgcgtcaacgcggcttcggccgccttcgggtcgttcttgcggcggtactcccagtagtgactctcagggaggaagaacatggccggcacaagcagcacgatcgggatgataccgaagataaactgccactgccagtcatggtacggcgagttgccccagtccttggacatggtcgtggcgttcaagtcgttgatcagcacggcctcgatcatgtagcccagggcagcgctggtgaggaacagcagcacacctttgcccttccagccttgcatacagatctcgaagttgtacagggggcacacaagcgagagcatggcgatacccgcggatgccaagcagattccgatcagcgccatagagctcgactccagccacacgagcgcacagccagcgaacgtcacaaagcacgaaatctcgatcgtccagcgacgaccaataacgtgcgccaagccgccgctcatcataacgcctacagcagctgcaccagccgcgtacaccttgatcatagtcaaattcaaggcgccgtccagcgtctcgttgttgtagtaaatgaacgactcgttcacaaagttgtctgcggacgagttcacatatcccaatgagaagatgaggcaggtcaaccagccgtatgtgaagccgccaaggccgcccacgacaacactcaaagaggccgcgaactcgcttccagagctcagcgcgcgcgagaaaccgccgttgtacatcatgcgcgtttgaatcgtcttcatgaacgggaatgccgacagcaccagcaggggaacggccaggaacaaacccacaatcacatcaaagaagaaggcaagctcgcgcacaaggccccacttagcaatcggcagaccgaacaatccgtgcagcagttgcaagtagtgcagcagcgcaaacagtcccgtgaaaatggcgatcgtcagcgagaacgacttgattccatcccaatcttgcatcgaacccacgacaaaaggggctacaccaatgatcaacaccataagtacatacagcatgccacgcggaacgcgggccttgttgcgcatgcacattccgaggccaaagccaccgatccacagcaaaactgcaatgccgccgatacatcccaacagcattccgatgtcgctcaacttgaaggaatagataaagatatagtacatgaccagtgggtgacggaactcgcgcactgcgtagacgaagcggctcattgggccgatagggtacatcagactggcctcatagttgtagaaatcgttccacgtgtctgtcggtcctgaagggttgttgctcggcagcagcctctcgtcgttttcctcctcccgcacagacatgagccacgaaagccaatacgtgatatccactcgagtcttggaaaagtccaggccgtcagtgttaaacaggaacggcgcgagcagccagcacgtgccgagcaaccacacagcgaacgaagcgatgccgtaatcttggcccttcgagctgtacgagttgaggagcgtgatgttcgacgggatctgatcggggtccttgtcacagtcaaagtccgcagtggcacagaactcagccagcacattcgtaccgatgttgaagttgccgtacgtgccgaagatgatcatcaaacccatcagctccacagccttgcggtaatgggacgctgcatactccttgtagaagttcacgagagtttcacgaacgatggcgaaaccacgaccggtaccgcggtacttggaaccaccgcgcatgagagcaatgtcgtagaagtgcgactttgtaccagtctcgaaaatgtagaacaccgggcccagagtcacgataagctcgacaaagttgaccacagcctggtgccagccgtactccacaaacagcgtggcaatcagcggaatggtcatcagcataccgaactggaaaatgaattgggtgttcatcacttcagcgagatcatccaggtagcttgtcgtaataatggcagactcttcgatctgttcgtgcagcactatgtaaaccttgccgtaagcgtacgcgaacacacacaacaccaccagcgcgttacagatgtagaaacccatgtggccgtagaacatcgagttcaggcggaagaagtccatgccggcacccattcggtgcgactcgcgactcaatgagctttcagcactaccgtttgccagttttgcctcgaaagcgttaatctgactcagcgtcacatcacgacccttgccacactgcatgaactcttcgtgagtaaccttctcgccacgaagcgcgacgttgtaaccagcgaacacatcttccgacaagttgattcccttgctggccttcgacactccaccattggacataataaatgacttctcgaacacatcagggtgaccgtagtgcatacgactctggagggggttcgcaagcacacgctgcgtcagactcacgaacaccagctcttgcagcgtcatgaagtgtgccaaagatgatgctcggcccgtgaaaatgtgctccttcataccaataatggtgacattctttccattcgccgtagccgtagccaggaagttggggatcttcagggcttcttcgaagtagtgttcttggttcatatcaattgtctgaatgtactcaccacgagtaaacgggatcgcgacgttctggttctcaggcttaccctcaccaatcatcgggtttccaggcaattcgtagcggtaaacttcgacgatttcatcaccatccgacttaaccagcacacagtcaaaacgaggttcggtgccactgccagcgggtgggcgaatcgtatccacatagctcacacgccagttcgggtacttgcgcatcagaaggtcaatatccgaagcacgcgaatccccagccgcgagttgatcggcgtaaatctggcaactggtcacgtacgagaacttgagaccagcaatgcggtccatgtgcttaattttttccaagtgcgagatgttttcgtcggaaccgatttcgagccaacgcaacattttcagcgcatcttcgtacatcatcatgccgtgcacagtacgtgccagcgtttgtccgcgcatcgatgcccacaaacgaacctgggtcggcgtctccgcaagcgcttcatccatagaggccacacccacacgctcgaggaagttgccccattcgtcatcgtggaaagtaaccaggtacttcaaaatgctgagatcgcggcccttttgctccaccttgcggaagagcgggttcgagtccacacgtccgttcagctcatcaatcgagaacagcacggtttcattgtagtacggcgtgacaacggagaacgactgcatcgctgcaatcgaggggatgctcgggatcttcatgtgcagcgagttcaagaagaaactcatgcggcgctgagcttcatggcaacgaggcaatgcgtcggcagcatccagtgtcagcaagaagaaaagtcgcgtggaaagcgagacaacgctctcattcgagctcggcgaggtcgtacgcgtcggcgagttggagtcacgctggctaatgcggtcagcgaagatagacagcaactgctccttctggtaagcaaggtccggcgtcatcttggcgaacgtcgacttgcgtaacttctccgccatccattcttcctccaacatcagttcaatacttttcaatagagcatccacacgctgcacgacgacgagcacctggtcgtgcgggaagcccattgcggcacctaaggggccaacagttggctccggtagatccaagatactcgcaagcaagtcaacgacattctcgcgcaccaatccaatgtgcgtgagattcaccacgccgctcacacgtccacccgccagaatctggtggaaaacaccgacgagatccgagtcctgggggcccaaaagctggcgcaatatctggaacaagatgtcaacacagttgttggcacagcccaacactccagctttcttcagctccttgaagagttggccatcgctcatacgcttggtcttagacttcgcggcaatatccgcggccgcttgggcctctccagcgatcaaaaacacaggctcctcgacagctcccgtgtctgaaatctggtactgaagaatggcagtctcgcggtcatccagcaaatcggacaagcggaagctgctcacgatttcgttccacacgactgcgaagcgcagacggctgttggcatcgggggcaacagagcttgacgacagggggttattgttgatggcgagttggccacgggcggcagcagataccaccttttcgtcgaacaggttaggcgcctgctgcagacgcgtcacgaactccttgatgcgtgccgagtgtccgatcttgagacggaatccaatccaggcacccacaatggcctgcgcgatggcgagccagatctgggagtcgtaaatgtacacgagcaccaccggggcccacatcgaagccaagaatgcgatgttgtggttcgactcgatgatcccgttctcgagctgggcggtagacacatccacgctgtagatttcgacgctaggcccaatcagaggcttcaccatgagctgcagattgaacatgaacttgcacacgaagatgaccgtccagaacaagccgtagccgaagaaatccccccagctctgacccatcgtgcgaccaatgtactgctcacgcgttccgtcgagcgagctcaggaaggccgagcgccagataactccacggaagagcatctgcatgatggacgagagcacgatgggcaccatgtagatgccgatgaacactggagccatcgtgagcaagtcgctcgagcccacgagcttctcgtacggcgccgcgttcacggccgtgaagaggccgaagaacacggtgtgccacacgagccggcaaaacaccgacaaggcgtacatcatgcggccgaagacgcgcgtaccgtcgagccagatgtccagcaccaccttgagcgccagcaagccgctgatcgacatgaagatggagtagaatgcgtggttgcggatgtccgagatgtcggacgtgaagaagttgctgtagaagttgaacccgtccgtgttgtcgggatccgagcggtacgccacgtagccgatcacgaccagcacgtgcagcatgacgaagaggaaaaagtagatgcggaagaaggccaggaacgggttgcagaagctgcggcgctccttgaacgtcttgtactcgcgcacgttgacggcctccgcgacgttgaactcgtcgaagttgaggcagacgtcgcgccagaagaactcgttcacgtcgtcgtagttggtcacgttcttgtggtccacgcccgcgccgttcttctgcggcgtgacgtcgcgcatcttggccacgaccgagtacagcggccgcacgacgcggcgcaggaacgcgccctcgggcgcgttgggcatgttctcgaggccgtcgagcttggccgccatcttgtggtacaggaagcacaggcactcgggcatgaagcgcaggttggcgctctcgccccagatgagcaggaagagcgccacctggcgctccgcggcgcccgcgtacggcgccgtgtccagcagatagggctgcgtgcgcaggaactggcaccacttgacgtagttgcggaagaacttggcgtggatggtctggatggcgttctccgtgtccacgggtgtcacggcggcctcgaggatgcgcgactcgtagttgagcacccagcactcgaagtgctccttctggttcagcacgttgccctcctggaagccgaacttagcctgcagtagctcgaacgagccggcgcccgggcgcggcggccgcgcgggccccgacgccgtgagcgccgcgatgggcgcttggccctgctgcagcggcgggcggctgatgctcacgccgcgctcggccgccacgtcctccaccgtctggtagttggaggccgcgcggcggcgcgggggcgcggccgacagctgccgctgcagtccgtggtctccgtgcttctccttcttcatctagttttgcctaagtctccttcctaccgaggggccctcggtgcgcgctctggagtcggtccgtccgtccgtcgcgggggggggatgtgagcctgtgagcgcgcgcgcttggtccgacgctgctgagctgtggattagcggggcggagtgccgagtgcggaatgggcgcgagcttttcgcctcgctttccgtttcccttgctttcactctcgagcgtcgagcagattgttcggagcgggacgtgtgcgagtgtgtgcgaccctagccctcgctggttgactgggagattgtatggccgcctgctaaataaaatttgtttcgggaagcgccgaaataggttcaggagcctcctacaggcgcagcggagggagcaagtttggaagatgtgtgcattgcaagtaagtagcatggcgccatggggtgaggagaagcgcggctaatggagcgctagatgctagcggacgctgggtcccattattgctctcgtccgcgagccaaggacgcaagggcggagggcggagctactggagaaaaaagagacagagatcgagtagtcagaccaattttctcccgcttaagttacgggtactgcgcccaacgacgggacgacctcggctaagtgctactctcgatactgccgcgccttcgtccagctgtcacctacgacagagtgaaaacagccacgatacttaagcgggagattaggaccgaaataagtgggaccacccgcaccagtcattgtggatcggagctgctcgaacccaagcgtggagctcatcgaagcagttagctgcggcacgcacgccggcactttcctagtgacgtggacgcccaagcgctcgacactgtgttggggcctgtcactgcctgctggccccggacaggcctcgcctccgctcctgacgtggtggccgccaccaacacctggcgctccccatgcatcgcaccgaatagcgggcgcatagtggccgcaagtcacggccagtcgagtgggacgcacagcatcggcgcgctctgagaaatgtatcgccacttggcgatcgacttggccaggggagctttcggacatggctacatcactgagaagacgagttggcgaagagcatggaaagcgcgtacatgtacacgcagcgtgacaatcccgccgcacagctattgctcaagatgggaagaagcagttgaagtgcctgccccatgcgagcatgcggcatctgccgctcggttaccgcgctcgaaaatacggccgggaaatttgagcgacggcttcaactcgccttgaatacagtacccgatggagtccgatgttggcgtggctgggcaagtgcagctcccgacatacatgtagtggtggtgattgtttgcgtaaattgctgcatttcgaatccaggaactaaatcgctcatggttgtcgtacctacgaaccagctagaacgtccgccggaagctttccgagcccggagcgctgcagagtgttgcgatgtcatctaggtgctcgtcaatgtggcttcgtgtgcttcgtagtacgtccggactaagctgccacgcatactttcattagtggagtctttatgcaagcgagttcggggcaagaaaaatgaatcggcatcgacatcctcccgcaagtagaaagtgaagggatagctaaggtcttagctatccattgcttgtatggaggctttcgtttggaggtacagtctccttgcggtgcagcattgtgctgtggtcatgccgatattgacgttccacgtgcaacgacggccgaagtgtgtacagctctacttcagctttactctgcaagaacacaagacagcattgtggcgttatttcagtgtccattgctaacattatttgtttctgtctcgcttcgatctatctactcgccggcacgggctccgtgccgaaaggagccaagtgaggtccatgctgccagccacggtagtgtcagggagcaggagccgcctcgtcttgcaagtcgtcctcttggtcatccccgcagagagcctcaaggcaaagaggagacggatcgaaacgattgaaaaatgtcggggagactgtgtcgtcatgacattgatacagtcagcaatggggtatcttctctgctggtcggaatttagttcttgtacttcatgtcctcctcgctgaagccgatggtggggaactgacgcacaaacgcagtcacgtcggccttgagcgcgtccacctggcccttcgcctcggcgtcggcagcgacgaagtccttgaagtccttcaccttcttcatgccctgcgcgcgagcgcgctcgttcagctcagccgtgagcttcacaccgttgtcaatgaaggcagccacctgcttgaagtcctcctctgtgcaaccgcgcgtcgtcagggcgggggcgcccagacgaatgccgccgggcacgaaggcgctcttgtcgctgggcactgtgttcttgttcacaaccatgttggcgctctcgagcacaaactccacgcgggcgccgtccacgccgcgcgacttcttcacgtccaccagagccaggtggttgtccgtgccgttggagatgatctcgtagccacgctccatgagctcacccgccaacgcgcgcgagttgttgatcacctgcgtctggtaggccttgaactccgggctctgcgcctggagcagcgccgtgctgagcgccgcgatggtgtggttgtgcggtccgccctggaggccggggaatacggcgaagtcgatcttctgctgcaggtcgtacatgacctccttgccgctcttcttgtccacgtggtgcacgcccttgcggtagaagatcatggcgccacgcgggccgcgcagcgacttgtgcgtcgtcgtggtcaccacgtcggcgtactcgaagggcgagggcacgacgcccgccgccaccaggccgctgatgtgcgccatgtcggcgagcaacacggcgtcctgctggtcacagatctcgcgcatgcgcgcgtagtcgatgtggcgcgagtaggcgctggtaccggccacgatgagcctggggcggaagagcgcggccgacttctcgaggccgtcgtagtcgatgagccccgtgctctcgtccaggcggtagggcatgctctcgaagaagatggacgtagccgagatcttcttgcggccgagctggtagccgtgcgacaggtggccgccgtgcggcaggtccagcgccatgatgcggtcgtgcggcgccagcagcgccgtgtacacctggaagttggcgggcgagccggacagcgactgcacgttgactccccactgctccgggtcaaggttgaagacctcgagcgcgcgcgcgcggcagagctcctcggcctcgtcgatgatctggttgccgccgtagtagcgctggcccgggtagccctccgagtacttgttggacatgacggagcccagcgcgtccagcacggccacggacgtgcagttctcggacgcgatgaggctgatgcagtcgcgctggcgctgcttctcgcgctcgatgatgtcgaagagcgccgggtccgactcggccagcggcttgttcatggcggcggcccactgcaggctctcgctcgaggcgtggcggcgcgacatgagagccgcgcggcgggcggggacgcgcaggaagccgagcatcttgtgggtggcggggcggaagcgaatgcgggaatgagcaagatcggcggcaatacagggataccactcactaacttagcatttcttaattgtaccagatgaagtatgtgcggtggacaaagttaatgcgtgcttggattgaagctgcgatgcgcgtgttgtcacggtcattttgcaccaatggctggcggattgattagacggcccgaacgatgcacaggtttacggttgcagttgttgcagcacagcatcggctttgttgtcctgctgctcagcttcctgcgcgattcgaccagggccttctagtcgcttcgctcttcggttccccgctcaatctcccagacgtcgatccggtccgtggaaaactgcgggtgcagactcgcagctgggacgcgcgtcttgacgaggtggtggcgctccagctcgctgaagagcaggcggtccgacacaatgctgcgcttctggtacgacatgaggatgcgggtcttaatacttgagtggcgcagcagcgtatcgaaggtcgccaccagcggtggaatgagctcctcgacccacacaacgtccgacgccaacaggaagtcgatatcgcccaagtccgttggcggattgaaccagtccaacacacgcgtggagatgtcgctgtcgacgggtttgcctgcgtttgcagcgagtttcatcgtctcggcgacattcttggcgaggttgtcgacaacgtagtcgaggtctgtgagaataacctgtcgtgcccctagcagtgcagcagagatgcccaccagccccgttccagcgcccagctccacaatacgacttcctgcaatgtcaccacgccgctgatgctccaggtacctggctagcacaacggatccgtcccacgtcgtcaaccccgtgcccttgcctgagtttcccacctcgccgatatgcaccaccctcccgtcgatagcaaactggtcgccctccgccacatcaagcccaaagatccttgagggtaatgctagacaagtgtggccagggaagagctcatcggcgttggtgagcgtcacgctcaatcttgaccggcgtccgagctgcgagatctcttccagtggagtgaactgctgtgtcttttggtcgtaaacctcaactgccatctccagttccttcgctgcttgatacccatcttcagcggttgctaaatgctctgtgaactgctgtcgaagcacggcgtctagctctgacaccgatgctggatgctctggcagtcgcagtgtgagtggcgcctgcagagtccccggcagtccgagctgctgctgcaattccacgcgcagcgtcaatggtcggtgagtatctgccatgttcggtgccgcaagaaccgatagcagtggtgcaatcaacgccaggatatgcagcagcgcgtgcagcacttgcatcgatgctcgccggtctgagactgacgtatccgctgtactctgtgccacatcaaacttgtgtccatttcatgtgcacactaaaatagaacgttctggatttagagcttctaacagtaaatgcggacttcaaccacttcaacatgctccgccaatcagcacgcgataagacctcgaggtcgtccccttcaacgttcgccatgccattgcagctggcattttgctacaaaccttctcagcggcagcccgccacaccgacgacgaagccacggcgagcatgaagactccagctgagcgcggccccgtccccatcagcggctacctgttcaagatgaaggccaaggagcggcttctcacgccgcagtggaacaagcgcttcttcgccctggaaggcaagaagctcaagtattaccagcacgagaactcgccggaggcctccaaggtcatcgatctgctggccatcgagtccatccggcggttcgagaacggcgaccacggcgtctacagcttcgtcgttaagacgccggagcgcagctacttcctgcgcgccgagagcaagggagacatgaagcgctgggtgcgcggcctcaaggatcagcaggatctgtggcgcgccaagcaggaaaaaggcactgcgctgccggacccggctgtgcgcagacccaagcactacagcgacttcccgctcgtgccgcaggccagctccggcagccttcgagcctagtatcgtgtaattcgaatcaatcttaccaactcattgaattgactccaccattaaccttataaaaacgtggagccccaaacgcctccaattcataccaatcacgctggatcacgagcgataccgggacaataccaatatttctgcctcttgtaaccagtgtccgacgctgccggaggtaccattctataaccccgcaaaccttgcccagcctggtgcgctctcacatagtgcgcggatgagagcgtgccgcttttccgaatcctgcagcagacgcgcgaggtccggcaccagacgtccgacgaagtctggctcgaaggagtccgttaaatactggtaaaattcgtgcgccgtgatctgctcgttgccgtacttccgcgtgtgagatgtgaacgacttcatcttcttcggatcgccgccaaatgccgccaacacggattccaggatagatttgtgcagcagctgggcctcctcgccgaccacgggttcgatgtccttgatgggcagcgggactaccaccttgttgcgcttgcgacctgctgaagaagacccagccctctctcgtccttcggacggcggggatactagcgagttgcgctgttgtttcttggactctttctccttcttcacctgctccttgaagcgagcgagtgcctccaacagaatattccgctttgcttcgtcggacaaaagtttcgcgctgttcagaataattttgcctgcacacttcgacccgacacactgccgcacctggtcacagaactcatcagcggtaatttcgtccatgccaaatctccgcgagacgtccttgaactgctcaatcactgcctcctcgttgcctggcgaatgcttttcagcccaagcggtgatgatagccataatttcagcataaatcgccttggtttcgagcgagttttgctgccgttcctcttcctggcgctggcgttcttcagcttcccgcttgagctgctcggccttttcagcctcagcagcagcgcgagccgcggcagcttcttcatatatagtctggtattccttagtctgattctgacggtaagccttcttgaactcggtgacaaactcatccagaatagaaaagaactccatgggcccaaccttgcgtggatcctcgccaaacgagctaactagctcttgatacgaagtctccagcccattaaagtcgcgtcccagttcctccagcacctcctccgcgtccttcgcaaacggagtcatcacttcatagaacttgtcaccctcaatgtgatcgttctttgacgcgcgcacttggcccttcagcatggctagctcggtattgtaagaagaaagatccgcgcggagctggtcaagagacaatctcttcgcctcgacaatgtgtggtacttctcctgcgaaagtaatgacatccggggccttctcttcgagctggcgcagcaagaagtgcatcaaggtgacacgagggtccacagacttaagagtgtgcagcttcatcagagtgtccagcttaaaaccataggcaccaccacgaggcgtgctgccgttcaaataattaccgatcgccagaatgtgctccagaacacggcggaatttgtcgctctctgtcacttgatcagtagcagcgaccagcgtgtccaactgcgcttgagtttccagaatacgattttcgaactgtagcttgtacctgaagcacttgatacgctgcgtgtagcgcgggattgtcagcaggtcaaggaaaaacttctccacgtttcctagcagcttgacgtctccatcgtaatttttgagcatatcaatctcctccagggtgggtgaaatcgaaatcagcacgttcaacacttcagaccccagcttctggccgtccaaagcgtagatagcattcttgatatcctccgacgacattttaaaccgagcaatggcgatcgatacattctgctgtctctttggatcgaacaggagcacttccttgggctgggccggtaccttttccgcttctttcttcttttcatccatcttcttcgatgcttcaaccgggttcttgcggaacatccattccatctcatccacgtccagctccgcatgtgagtcattcagcttcatccagacggtgctactgactacattgacaggcacacgagtccagaacaacgggcgcagctcgacgttcggctttaccgtttccttcttaggaagctgaggctcctcgggtttcttcgggattggcttgttcaactttgaggctaagctcgccttcaacgccgatgggtccaccttcaccgcttctgtcggaggaggaagcccagcaaggagaccgccgcctccattgcctccagccgccttctggttgggtgacggcgcgtctggcgtatccagcaagtcggtattcaaacctgccgcgctcatcttcattttgacctgctcggcgggcatacccatcttcaccagcttgaagaatttttcgtaagccgggtcttccttcacagtcatcacctggttggctgccgctgctggagctgctgccgcaccagatccgggcatcggagcatttggcgtgtcgaggagatcggggttcaggccactcgcgctcattttcagcttgatctgttcagccggcattcccatcttcagaagcttgaaaaacttggcgtactgctcgtcgtccttcaccagggtaccacctgtcgctccaggcggagccgacgtagtatctgcatttggagcagcaccgccgatgatcgcatccgggtcatcaaggatcgacgggtctacgccagccgcctgcattttcatcttcacctgttcagccgggagccccatggtcaccaacttgaagtacttcaagtaatccgggtgatcctttgcagcaacacccgtgccgttgctagtaggtgccgctaccgctgcgaatggcgcagatgctgcttgaggtgccgcttcagacgcactgcggttgttcgcctgcgcttcagcggcagcagttgcagcggcggccgctgctgcagtagcctccgacactgcgcgcgcgtgctcctcttctctttcgagcctccgccgctccgcctccgaaatctttcgcttgaacttctccacacggttccgcagcttctcgttctccacctgcagctgtgccacgagctcctcgacctccttcgccctggctgcagcgtcctcatctccttcgggagtctccagccccacgtccactttcttcttcacgggcgcgtcgtcctccgattcctgttccgccggcgcgtcatcctccgatccgtccgtgggctccgtgggcgagccgctgttctcgtcaatcaccatgaggttcgtggtcagcgagtcgcggtagcctcgattgccgcgctccccgtctgcagcgcccacgccgtccacgctcacgggcgacatgagctgctgacgcaccgaggtgccgcactcgatgcagaacttgacgcgcggcggcagctcgtagccgcactcaatgcagaacttggccgtgctcgccaactgtcatgcccatcagtcagtcaataaaacagttagtcaataggccaaaacacctggtccagtccacttcaacttgagtcttccagcactcacattcgtgacttggggcgcgctcgcgggcgcgaaggacgatgacgacgacgagaagctgcggcgcttgctcaccgtggggcgcgagcccgtgatctcgagcgtggcgtcgtcctcgaggcagcccatgcagtaccactgcggccgcgagcgctcgggcttcttgcggtcgatggccttgcgcccgcactccttgcacacggcgatgtggcagctgcggcagtggtggcggcgccgcaggatgttgaacgacttggcgcacacgccgcactcgggctcgcgcgcgaacgcgtcgtcgggcgccaggctgagcttgctgctgagcgacgcgcgcgtgcgcgacgtcgtgggcgtcgctgcggccgccgcagcagctgcagcggggcccaagccgtcggcgttcgtgggcgagaacaggccttggcgcgcgccctccatgccggtcggtcgcgtcgggtcgggcggctcgtagctcggtccgatgtcgcgcttcttcttgtgtcctgacttggcgcggcgcttcctccctcgatgtattgggtttgggaggtcttttatgcgttctcaggggcgacaaacgcatgtcgcaggattcgggttcagcttgacgcttgtccaacgtggggtgatgacggcacaggttgcagtgcactggcaagggcggacttgcacttacacagtgtgagttccttttgccgccaccggcctcaactgcaccggcgtggcgtaagcgcgagaaaataaagtttgtcgcgcagggaatgagggaggggagaaggaggaggaagaaattccagtgcgcagcgctcatcgaggagctaagcttcggtcgacgcgagcgcggagaggacggaagcactgcgcatgctgtcgttgacgcccggcggcgtcgggttgttgctcacggcactttcttcgcgctgcaacgcagcggctgcacgccggcgtggcggcgattttcaagcgtgatgccgtgcgaggagctctgctggcattttgctgccagcgcaggtaaggaagcttgttcaacacgagttgcgttggttgtgtgttttcgtgtgcgtggttaacaggcagcaggtggatctgttgggttacttaagtactgcataagtatggggggggcgcaattggtatttaaatggcttactggtggcgagtacgacacagccaggaagtgcacagtttgagtgtacattcgcggcgcgcttctcttggtttgattcgaatgttgttcgtctacaacttggttttgttaaaagtccttagtgcactactggtagttggctgctgctgtcttcagcgcattcgcgcctcgtcagcattgcagcaacgttaccttcggtagatacatgaagtcgaagttgatcttggactcggggctgggccagcatcaccggcacgccccgtaccaagcgtcatgcagcacggtccgccctgatgggcgccgctgctggagacggggaatggcggaaatgctacgtggccgcgcgttccagcaatcgtgcgtctggcacatggaccattagtcgacacaagtgaatgcgttcactgcgatgaaagtcatcccaaagctttgattgggtgtccacttcaaccaggtgtagccaaatccacaaatgactactccgaagcacattagagacttccaggcagtagcgtgaccactccgaaaaaagaacgttttttcgggtcacgctcgctctgtgactaccccgtatacaaaacagttcttccaggaagtcagaagaaccccgtcgaaaccgatcggtcacgacagtcgctacaaagcagcggacagaaagcttccaagctagtcaccgagatgctgctcacgttcctcgagaagctgccgctgggccagggcggcaaggtgttcgtcggcacctccatctgcctcgccatctgcgcgtaccccgtcatccgcaagcgtacgcgtcgccgatccatagccctctatggtctctctctctgtgttgttggtactgactcctccttgcttgcaccctgtactgcagagcaaaaggccggccacgacctcttctcctccgagagaccgcaggacatcgtggaccaggagaccaaggcccgtcgcgagaagctcaacatcaagtagagcgaccccactcatgcacagtagagcgccctcccttcagcttgttattcggacctccccgagatgggaatatacctgtgactccctcactatacgtagtgcctcacatcatgttgtacgaggacacctgcactttgaattgcccggggcctttcttcagcaggtagcactcgttgcggaggatgtccacgaagtcccggaagtcgtccaccttgagccccatactgtcggctacttcgagcagatcgtccatggtgaacagcgacgtgttgcgtctggccgcggctttcatgagccgcgccacgtacgccttcaccttcttggccagactcatgcccccgctgcggccgaagtccaggttcccgtcctccgtggtcagagtgtccagcagacactcctgcatgatgtcgaccacgtcttgcgcgtgctcggcagagacggtttcggccagctcggctcgggcgcgggcttgtgagaggcggatcagcgactctagctgacgcgttgtgatcgggatactgtcggtcgggttctgttggccttcaccggcggaacgaagctccagatacttcttctgtagcactgcggcggcctcggacgatagtcgcgggtgcacgtatcgacgcgcgtaggcgatgaacttgcgcacgaagtagagcgggattggactcatggtgtactcggccgcattctgacgaagacggtgtgacagcaactggtgatccgagggcggagcctcttcgtagccactagctggcggttcatccgcgtagctgctggagctccaggagcccatcggcgcgctgctgtctctcgcgcgttttcttgacttccgcctaccgcgcgcgtgcgagttcatcacgtgttccgacaggagtcgatcgcgctcttcgtccggtcggtcaagcagaataaagacgaggtcgaaacgggaaagcaacgcggctttcatcttaagattctccccaactgagcgactgcggtcgtagtgtccaccactagggttggctgctgcgatgactgacgtcctcgcgttcagattgcacacgatgccagccttggcaatgctgatactctgctgctccattgcttccagcagcgcctggtagtcgatgcccattttgtcgaactcatcaatgcagcatacaccctggtccgcgagaacgagggcgccagcttctagcgcgtagtcgccggatccatccttcaccatagtgaccgttaatccagtcgtggtggtggtatttcctccgacgtacactgctcgtggggcgaccatagacacagctcgaagcatttggctcttacccaaaccaggatctccaacgaccagcacatgagagtccgctcttcgtacgcacgtggtgtctttatcgtccgtattccgcgttcctccgagtagtgccaggatcaggcccgcttttacgatatcgttgcggtaaattccgggacaaagagagtgaacgaggtggtcgaacacgttgccctgattgataatgttgctgatctgctccaggtcctccttcgtgaagtcgatatccgatgccttgtccttgtccttatctttatcaacctgcaggaatggacgcaaacgacagcagacacaccacaggatcagcaggaggagcacctgggcagcagacaagtaccagcactcaccttggccgagttttcaaccgagttggcgcagatgtacagaatatacaagctgtttgcctgtgcacgcttgccgtatcttccttcgtggatttccgagttgatgctcttcacgacgccggagatcgtcaccacgttgccaggaatacaggagtcaacgagatcttcatacagttccacctcaatctacgcaccatgtagctccattagcccaattcaaccagcaaccccagggccagacaaccgaaaacgcaccattctgggcatgcgcccgggtccaacgtccgtggtttccatctcctggagcctaacaacgcagaaatctcgtcaaataataaaacatcaactgctactacaaaatagtactcacttgatcttctggtagtcgaccgtatccaccgacgatcggttcggcagcaacgtcctccctcgacacggcgagttctcgcacctctgtggcggaacaaactttccatccgggaaggctcgcgacgtggcttcgttgcacttggcgcacacgaagtcgcacctcgtgaccagcggcttaatggcactgactctcaccactgtccccacgacgctcacgaactggttcaccacgtccgctttcagtgctgcaatgggcagcacgggcgtcactccatgcagtcgaaccgtgatcttggttcggtccaccggcacactgcgtttcctggtgatatcctcctccgcctccacgcgcagctcgtgacgtcgcatacacagtgcaatacccagacacagcagcacgtcctcgatgttctcggtcagcgcgcgctcaaagtccgccgtgcccgtgcgaatgagctccgcgtagtggagccacaccaccgtcacgttcggctgcgtcaagtcgcactggcaatttaatatattagtacaataaattacaaggttatagtaatactggggttgcattacttgcagcagcggcgcccactgttcgccgtcccggaagcagttgaggaaggtcatggcggcctggaagcggccgtccgtgtcgctaatggggctgtaatactgcgccgagcgggtctcgcccggctgccgggtgccgatgttgtggtcctctgggtagtactgattccacacgcacgtggcggcgtccacgaggctgctaggggacgagtcatattgacgcattgcgttggttgctacaatggaaatgatcgagtcaggtatatacaaatctgagtcagtctgattctagaatctgagaagtggtcaagttgaagtcgtcgttttgaagttttcttaccccgttaaatattcttgtacagtaccaaccattgtatgaacatgtagccattttaatgacacttttaaaaagtgttatctgatctattctttaaaaaactgaaacagctctcttaaaccgagcaaactggccatatctgaagtaaaactcgtttttactgcttcgctaacctttgcttctttttcagggattcaggcatctccactacggatctcttatgctactctgccttatcccaatccccgatctcaataaacaaaatgagtttgcctccccccttctcacttttctccttgtcggagatgatcgtcgtcgacttggctgccatgagctccacgaactccacaagctcgccgtcttctttcgaaatgcggaaaaagtcggcgtactgcaggttagcacttaccaaagcattcgatggaaccgccgggtcgccaaggttgccgaagtacgtatcgtgtaactttctcaccaccaccaagtggatcgaagaagaactcggaacacgatcaagaacacttatgagagttcgcacgtctaaactgcccttgcgatccttgcactcgccagaaagcccgcattcacttgagacgaatctaaaatcaatccgctcagaatcagcaacacgacacaggttggcgaactgggcaccactaccccgccacgcatccagaaacgaactcggccactctgtgttaggcgccgacagaaacgggatcgtgctcgtgttcttggcatggtttgatggaatatcaacctccgcgtcaattttgtccaccacgcccaattcgtagagcagtctgccttcttaggcagactgctctacgaaaataagaacgctgggaatttcaccccgcaaaatttctcgcgatggcttgcaagaacgactgcgccggcaacaagactttcgagcgccctaccgctatttagctcttgcataccgcggaggtctgtacctcggaaaaagttgtcttgcagcgaatggtacagtgaacatttcagtggccgcaacatcccgtccccctcctcgtcctcgccagagtcatcgaatatcttatcgtggtctcccatcagagtcagatgcagcaatatatccctctccggcggcgggagctgacagcgagctgtccactggttgtcgccttgaaacagtatgtctccactacccaaatcgagctcaaagggtttcgactcgctaaggcatgcaaagtggccgtcgaccagattagcatagctgttgtccacgctgcaggtggacccgagaaacatgctgacttgtccaagctcagactcgacagaccgaatgcgggctttgaggcttcggatatgcggtgccaagtacttcgtcatatcgctcaagtaatgaagccagtcctccggagtctcgccatagtcacggtgccggctcatgtattcccacacttccctcgcgaaaagtggccggctgtgtttgacgatccaaaagagtccagcaggtatagtgccggtcctgcgtgttccgaccgaatccgaagtgattgcgacgccatcttcatttaagacgaatgcaggaagtgacggaaccacaacacaccaaggggttctatcctcaaaactcgatgtaactcgggatctttctccaaaaaaaaaatgcgtcgtgcagtcccgttggtggcgctgattacaacgggtacccgaaaggagcggaacacactcctcaacaatcgaaccattgcttcacgctcctcccgttccnnnnnnnnnnnnnnnnnnnnnnnnnnnnnnnnnnnnnnnnnnnnnnnnnnnnnnnnnnnnnnnnnnnnnnnnnnnnnnnnnnnnnnnnnnnnnnnnnnnncgcagactctcgatggtgtgatttgcagtcaggggcactgaggctgcacttgttcttgcgaatgggggctgggtaccggcatccgtcaagtgaaaccagaccttcggcacttccacaacgagcgggtcttctctgttcagtccataagcgctcagtgcatcgtccgcgttcagaggccccgcagcttcgctgttcacgaacactttgaggactgcctcgtcgattagacctggtggaagcgagtctgtgcagcgtgccagcaccgtctcgcaaaagtccccggcgtcagtgccgtcacgaacacgaacgtatcgcactggtacatccccaagctcaggttgagggcgacgcgctccatcaaccagccggaaatatctttttcgctccatcgtcgacttctcctcagccccgcagaatctggaatgatacagtgctccatgcggtcacaatcgagcgcttcccgcgctctgatcttactgtaccactgtaagtctgagaacgtaggctccaatctatcggtagtctactgtacctacctacggtagactgggtttctcgtgctgcacttggaggcagcaacggggcggagccacggtcaaaatggggggggcatgccctcccgttttttggagaaaatttcccgattttggtcctcttgcccctctgtttttgggatgccccctatttttttcgggctggctccgccgccggcgggcattgtcggcaggagaggaattactctagccaagtagttacttcaaattttcaaaaaacctaagtaggtttcggcagctatgtaagtagattaggacacatgagttagttagttaaactatcaccatgctacgcgctccgcgcggaccttccaccctaaaggctcgctacgctcgcttggacagaaccctaaaaagcccgcttcggctcgcacgcgtcgcctccgcttgctagaagggcagtgctgggtcctgggtttgcatccgcgtgcttcgcacacgggctgacaaaccgcaggcggggagctcgcttcgctcgctgtgtgtgatggcctgacctacttataagtagctcaacaatctcctcaccattttacatatgggcgttagctacttaacaccctgtctctgtaacaacccgcaccttttcgcactttttggatggcaagtgtaaatttccaacatttttaaatcaacctaaattggtctagcttagagttcaaaggaaagacccgatcaagaaatggtagatgcagcctttgtagactcgcagcactgaaaatggatgagatacgatggatcaaagaggcgagacctgatatgtgtctcgtcaatgaggcccttcgtcgaggggtatcgcaatcaatgtatgacattttgaccataacccgtccattgtgggcataaaacaaactataatgtagccataatggacagaaaaggcacatttcatttacacatttcggcagatttcgtacttccttgcccattcataccttctacttgcgctacgaaggcgaaacttcacagtacatatttttatgctgtcagcacactatgtgccaaatttcagctcaatctgagctctcgatcatagggcttgtcatctggggggtgcgggcaggctagagtaattcgtctcggcaggacttacgtacacagcctattttcggtatatcttgtaaaggcagcccatcacccaccaatgtgacgatcttcccgcaggacggatgtcatccgcgtgaaatggctttgctccgctgcgctccgcaaagagagggggtgaatctgcggtgctgcagtgtagaccccccgcaattagaaaactagcaccgagttgcagcaacgggtccatccgctggaatgcctggtgcaggacctacctccgtaaaatcgcgcagacctgctatatgggcactccgcgcaggtttgcttgctatggcaacgtgctttcacaacacgaccagatgagcccatcacacccgtcccactgctttctgtcaatacaaatcctacattattctgatctgtgttaacaagaaacgatacagccatgtgcatgtttattagaaaattgggatacttaagtacaatttttccggtagtgtgggtgcgtaactagcggattttcccgaatacaagacctgtagcaaatagaagtcgggtcaggaataggttggagtgcctgaaaatagaagtcctgtatcaaatacaagaccggacatctattttttataaatgtactcgaacatttagtttttaaatgtttgcccaaactctgtttgctttggagctcgagctcattccaaccctattggttttgcttcacaacgatacgatgtacctggaaaaagcaatgaattgtggtcgtcaaccgatctcgctacatgtactcactccatcagcattgctgtcttagacaaatatctattaattcgtgtaaactgcttaaagaagatgaaactgaatgaccgttgatctttttcgtgacgagcattgaacgcctacttgcgattttgcagcgtgttgcacggcctagaacttacttgtgcagcctaaacacttcgttcaaaaccattttaagctgctgctgctgctgcaagtgcagggcaaacggatagcggaagcctttaaccccccacggctaatgtactcgaggggctgcttcttacccaaaagcttatcgatgtgagtttgagcgtacctccaggcaccctgatttagcggctctacctaagcctagacaaaacttcttggcatctcgacttggccagcttgtcagtcgtacatgggaacggcgccaattctttcagacgaaccaatgcgatacgaaccaatgcgatggtcttggggttagtacggaccacactatgtgaccatactagttttgccttcctcctgaggcgccaccaacccacactaattgcatgcgttctctaaaggagccagtccactcattgcggaaccaaacaaagagtgcatttgtataaatgcgaacggcgagtacgtgcagcgctgcggaggggacattatgagtgtcttggaggaggaggagaagcaagataaccacgtcctgtgttgagcatgtccagggtccgctgctgcgttgaagacacaccaccacgggcggatgtgccgggaaggtagaccatcgagctccgatgaagagatacaactgtagcttccgcggcacgaggcgtacttgagcaactataacatgtacgaggatgaagattggaccgaaggcggagaaatagcatgcggaccgatgcacccatgttggaaagtattggtgcgaaccttcgaagcaattctctaaaatttactcggcgtcctctaatcgagaaagtatactcaaatcaagtgaaatcgtttaataatttccgaaatcggatggtttcttgaaattcacgtaaaagtagaggcttttcggtggagtggcgaactggttgagcaggatatttattctgggatagcagtaaccccggagggagtgctgcccggcaactggctccggtaaactgaagccggtaactgaagcctgcgaactgaaatatactgaatagggggtttcaacatcaacgaaaatgcgggattttgcgaaatacctcccgaattgcccctaggtaccactgtatttccccgaagtaccactgtatttcgagcccttcaaatccaccatctcgggaggtagtggatttgaaaatccgtgatatgatcataccagagtatttcgtctaggctcagtcgagttgtttggctcgcctgctgtgcattctgtatagagacacagagctacaagttgtagatgtagtctgcaaccgtcccagcggtatgtgagcgatagatacaggaaaatgtttgccaaaaacgttgaattcgtctccaaaagatattttaactcaattgcagcctttgaaagccgtttccgggtcaatatcgatgttacgctcataggtatcgcagtacacgttgctacatcgatgttggttgtctaccctccgcctgcgtgtgccttcaagcagcctacggagccggacgaggcgcgaggctcggaagatccctgtcacccctggtcgacatcgcaacgcgccagtcaaaaacgatgttgtggaccacacaaatgcatgataggtttagagtttttggtcctactgtatttcggcagaataccactattcaaaatgcagcgggttttgaagtgccaaaaagttgattttgaaaccccctaatatctgcgttgggatgacgcgttctccatcaatctcgaatcttggcaacggacacaggtcaacaattataatatcctatttgaaaaaaagactatcgcttctgcggaggcaccctccaacatgtcattgatagttttagtgctgctatttaggctgcccccggtgggtatcatatgagaccgcgtcaaacgaaatggtgcttacgaacctaagtacgaatcgcgatttaaccgcatcaatcgaaagaggcgtggcttgtgcttcctttaagctatcgaacagtccaaagtattgagaactcatggagtaacatcgctctgaaaaaagtatctccattttcggacctccgaaatccctgatgttatttggggcgtgtgacctcaatattttttcgatttcgacctattgtatatgatcggaaagctcatgctaaaagcaatcaaataagagtgattttacgcgttttacgagtagttttcattttcaaaattgtgatgtccggttatgtccgaaatttgattggtcaacttcgaacgcgattatattatagacgcgttaccgggcagatgctgcggctgcgaagcaggcgcagtagatgcccgtagttagaatcaactaatcgtggaaaaggagacccgaatacgattcattgtgcccaagtttatccgttaatagagattatcaccacgagatggtataaaaaggctatttcctctgaacgagccgctctattttattggcacctcggttaatggagctgcaaaagcccacagctagagttcagggcacatgaaatctagtgacgaagtttgagcaagaaaggtgtagtagttctctctctacggggtcataagctaacaatgtagccatctactacaaaggaattaggagcgcagcgctgtcgataaaatgtacctcacttcccgctattttgatggcggtacttagctaaaagatcatcaagaagtaaagaaaagccgcaccgctaataacgaatgcggatttgtacaggattggtacctccgtaaaacgtacgctgtatcgtcgattgtgttgttaattattagtgccctggattaatgggtagcacaactttgcatgaagtggttacacgtgcgccccgtgtaggtgctcatatctccgtaggtgaggtagtctatcggtcctacggtcggctgcagtccttactagtacttggctgtggtttggctcattttggggtcgattcagtaaagtgcggatttagttggtctcagatgttcaggggtaccgtcgcatctcgtggcgagaatctctgttaaaaaaacaaattttgtccgtgtcgctgcaagctgaacgaatgaatgaaggggattcagttgaggtgtcattaaaatgaaataggtgtcactaaaatgatttgctttagtaccggtactccaccgtcggacagttggaattttgacggtacatgtatcgctacaatcccatatctcattccaaggaagatcaacaattcagtttcccaagagcgtacaaccagcaattatattgtgtattgtgaacgttagtgcgccttacgctcagggaataagtgatctacactctccaaacgtggtccacacacactacccctagtagtgggcggccactaattgagctcctacttacaaccagcaataaccagttaatcaaatcatcagttttagtatggctacaatcccgtgtacatatagaatgaatgtcgttcgacgtcatgcgaagctacgaatgtagcgcgaatgacgtttgatgtagattctcaatttacagtagtcgacagcatcgaggacccataaatgaccctatccaaattatacatatttgaaattagcgtttcaaacctgaaaaaagtaagactcaatcactgctgtgcggtgcgtagaacacacgaaaccctcatggaaaggaatgacaatataatactgagttcagtatgtaatcacgattacccgtcttctctaataatagtatcgtatagggtttgacaccttatcaaaatatgaggtgcaaatccaatgcactgattgactgaaaagctagtacgggctaggtcaattctttcgaggccacttttggtccgtccatttttcgttgtgttaagcgtttttagcatagataaagctcaatgagctgaagcgactggtcctatttttatcaaaattgaccaaatattgattacgagcttatgggtcctcgatgctgtcgacctgaaatggttcttcaaactcaatagtggttatttaacaacaatgtagtgaatagtttgaaaaaaagtaaattcggctgtttcgtcgttccacccatttccggattctgcggcgggaagtcgacgatggagcgaaaaagatatttccggctggttgatggagcgcgtcgccctcaacctgagcttggggatgtaccagtgcgatacgttcgtgttcgtgacggcactgacgccggggacttttgcgagacggtgctggcacgctgcacagactcgcttccaccaggtctaatcgacgaggcagtcctcaaagtgttcgtgaacagcgaagctgcggggcctctgaacgcggacgatgcactgagcgcttatggactgaacagagaagacccgctcgttgtggaagtgccgaaggtctggtttcacttgacggatgccggtacccagcccccattcgcaagaacaagtgcagcctcagtgcccctgactgcaaatcacaccatcgagagtctgcggaatgcagtgatgaagatgtacagctcaagtcgccttgctcgggttgctgtgtccgacctccaagtaatcgacagcgagatgtaggggcctttggatctcgagatgccgattggatcgcttggtcggacgctggcgactgcgctcatcatcgaagtgccacaaaacgtgggtgagctgtaccgcctcagtatcgaccaagagcatacttcttccgtccaaacctaccaaaacactgcgcagcttctcaaggaatcgctcgaagtgaaggccgtggtgaaacttatcgagaacgcgagtgaatctccaagtccaacgcggtttgttgtgctggaaaactcgtcgggcaccggcaagacgcagatggcgttcaatctgcaggccacagaggcttgtgacgtgttctacgtgctgtgcacacctgcaggtgatcgggatcaagacgtgtatcgagctttcacaacgcgcacgattacatttttgagttgcgttaagcacgatatgcagaatggatcagctcgcggggttgggacggcaactcggctgcatttgcacgccttcatcgccgctgcgctccgtggtgatgccaattttcaaggctcagcgacacgagagcaagtggaagaagcacttgaccgctgaaaacaaatgagcggaagcaaaccactggtattcttcccggacgagtttccgcgaatccaatcgcccatgcctcgacaggaacgggaggagcgtgaagcaatggttcgattgttgaggagtgtgttccgctcctttcgggtacccgttgtaatcagcgccaccaacgggactgcacgacgcattttttttttggagaaagatcccgagttacatcgagttttgaggatagaaccccttggtgtgttgtggttccgtcacttcctgcattcgtcttaaatgaagatggcgtcgcaatcacttcggattcggtcggaacacgcaggaccggcactatacctgctggactcttttggatcgtcaaacacagccggccacttttcgcgagggaagtgtgggaatacatgagccggcaccgtgactatggcgagactccggaggactggcttcattacttgagcgatatgacgaagtacttggcaccgcatatccgaagcctcaaagcccgcattcggtctgtcgagtctgagcttggacaagtcagcatgtttctcgggtccacctgcagcgtggacaacagctatgctaatctggtcgacggccactttgcatgccttagcgagtcgaaaccctttgagctcgatttgggtagtggagacatactgtttcaaggcgacaaccagtggacagctcgctgtcagctcccgccgccggagagggatatattgctgcatctgactctgatgggagaccacgataagatattcgatgactctggcgaggacgaggagggggacgggatgttgcggccactgaaatgttcactgtaccattcgctgcaagacaactttttccgaggtacagacctccgcggtatgcaagagctaaatagcggtagggcgctcgaaagtcttgttgccggcgcagtcgttcttgcaagccatcgcgagaaattttgcggggtgaaattcccagcgttcttgggcagacagctctacgaattgggcgtggtggacaacatcgacgcggaggttgatattccatcaaaccatgccaagaatgcaagcacgatcccgtttctgtcagtgcctaacacggagtggccgagttcgtttgtggatgcgtggcggggtagcggtgcccagttcggcaatctgtgctgtgtcgctgactcggaccgtgtgagtggggattccgagcggagcgagtacggattcgttgcaagcgaagcgggaaaggatgcttgcattctttccggcgagtgcagagatgacaaggaacctttagacgggcaaagtcttgtaaatgtgctgcagcgtgttcctggtaattcttccattcacttggtggtggtgcgaaaactgcaagattcatactttcgcgacctcccagatccagcgtctgcagcgtgtgttgccttggcgagtaatgcgctgacttttatcgcatttcgaaagagggcgagctggaggaattcgcggagctaatggcagccaagtcggccttcaatggtttatcgaaggaaacgaaaagggagaagggggatgcagaactggttatgtttattgagattggagattgggttaatgcagcagaggggtgcgaggtagaagtgccgagactgaagaaggagatgatggcgtgagatcaatagttgttagtcctggcgtggacgagtaccggtctgtctacagtagcttttttcttaggtagcattgttgtcatttcgataatacttcttcaagtacatgctggtcggttcacctcgaggacttaaaaacttgctgagatctgttgtaggtggatgaataagcccaagaactgaaagccatgaagtttaaaagctcgtagtagaacaggcgtagacacaacagagcgagtcacatgcgatcgagctacggcgcgcccaccacctcggaggagaccacggaggtgcctactacacgtatatagtgaaattgctgggttcgattcttctaataacgatgagacggacgagcacgtaataaaactagctcagattcaaatattcgggaaaagggtacagagttttgaatgaactcgaagagacataagtttcagtccacttaatgagatgttgggtaatcctggaaaactcaccaacgccaaccgagttgcggatctggatacaatagcctgatgcattgttttaggctgagcgataccaacagaatttgctgctttgaccttattatatattcgaattcgagcatttcgtcttgcctgctgttgtatcccaatctccaatctcaataaacacaaccagttctgcatcccccttctcccttttcgtttccttcgataaaccattgaaggccgacttggctgccattagctccgcgaattcctccagctcgccctctttcgaaatgcgataaaagtcagcgcattgcacgttagcactcgccaaggcaacacacgctgcagacgctggatctgggaggtcgcgaaagtatgaatcttgcagttttcgcaccaccaccaagtgaatggaagaattaccaggaacacgctgcagcacatttacaagactttgcccgtctaaaggttccttgtcatctctgcactcgccggaaagaatgcaagcatcctttcccgcttcgcttgcaacgaatccgtactcgctccgctccgaatccccactcacacggtccgagtcagcgacacagcacagattgccgaactgggcaccgctaccccgccacgcatccacaaacgaactcggccactccgtgttaggcactgacagaaacgggatcgtgcttgcattcttggataggtttgatggaatatcaacctccgcgtcgatgttgtccaccacgcccaattcgtagagctgtctgcccaagaacgctgggaatttcaccccgcaaaatttctcgcggtggcttgctagaacgaccgcgccggcaacgaggctctcgagtgccatactgctgtttgtcccgtgcgtaccacagaaaacctcacctcggaaaaaatcgtgttgcagtgcatggcgcagcggactgctgagtggtcgcaacactgcgtcttcttcctcgttcacttcaggggcatcagagtcatcacagtcctcacagtcatcagttatcttgtcgtagtcccccgttagcgtcagatacagcaagatatccctctccggtggtgggaaaacgcagcgggacctccaccgcttattgccttgaacaagtctgtgaccactaccccaaatcaagcttgaagggcttcaactcgctgaggcatgctaagtggccgtccaccagattggcgtagttattgtccactctgcaactcgaaccaataaccaggctgacttgtccaagctcaaattcgatgctgtctttgaggctccggatatacgacgctaggtaccccgtcatatcgctcaagtatcgaagccagtcctccggtgtttctccatagtcacgatgccggttcatgtaatcccatgcttcctccgcgaagcgtggtcggctatgttcgaagatccatgacagaccagggggtatgcaagtacggcgtgcacttggcacgtctgaattgggcgatataccgccatcattcaagacaaacgcaggaagagacggaaccaccacgcaccaaggggccctatcctcataactctgttagagccaaagtggcgaggccagccggagggatagatgaaggtggtggagccgagtgtgctctatagggaaaaacacgaagtgtgttgtatttgagtgactttaggttgtggtatctgcttgatgtgcaggacctccacgtgagaccgccacgtggacacgagtgtggtgcttgagcttggtctggatgtcccaacaaactcgacgtacaccgagatctctccccccaagtaaaaagattccgtgcagtcccgttagtgtcgctgattacaacaggtatccgaaaggagcggagcacattcctcatctatcgagtcattgcttcacgctccttacgttcgtgaccacacaaggacgccttgatgcgaggaaactcgtcgagaaagaacacgaacggtttgcctccgttcatttgttttcggcggtcgagagcttcttccacttgttcccgccttgctcggccttgaaaggtgtcgtcgccacggaccgcagcggcgatgaaagcgtactcgtacagcttagttgttatcccaaactaaaagtcaccaacggacccagtcttcaatacctccaggtctttgctgaggcactccacaaacgtgttcgagcgcgtagcgaaagctcgatacacatcttggtcccgatcggctactggtgtgcacagcacgtagaacacgtcacaagcctccgtggtctcaagattgaacgccatctgcgtcttgccggtgcccgacgagctctccagcacaataaatcgcattggacttggagattcgctcgcggcctcgataactctcactatgtccttcacttcggtcgagtctttgagaacttgcgcagtgtttcggtaggtttggacggcagaaaaatgttcttggtcaatagctaggcggtgtatcttttcggttggtggcacctccacgatgagcgcagacgcccttgtttggccaagcgatctaatctgcgagtaaaaatctaaagactcgttcaagtcgtacgccgtctgatccttgaacacggtgagttgactcggtcttgagccggcgagaatgccctggttggcatgaaagactttacgctgcaaagtcgcaatggtgtcctctccgggcagaaggattgacacggggcgggtgttcccaaatgcagcgcgagttacggcatcctttagctgaaaccagaccatcggcaccaccacaacgagcgggtgatgccgatcccccccgtaggcgtccagattcgtgtggacgggaaggggctgctgcaatttgctgctcgggaacacttggaggtcggaggcaatggccctagagtgtagaaatcttttgtagccatccagcaacgccatgcaaaaccctgcaacatgagtaccagcaggaagctccagatagtgcaccatgcctagggacctacggccgtttgctccatgaaccaaccggaaaaatatcatctttcctgtttggcttcccaccccttcggaatatttctgaatgggagagctacccctttggatattggggggggggtcgatagacagctctttaccatgtcaggtcagaatgtcaccggacgataggcacaacttgatcaattacagtgatcacccttcgtcgtgaaagttgtccacccgttgtcggcatgagtaccaattgttttcaagttgcctcttgatgtaggttgattttgcgtcattaacatttttcttggctcacgttcactcaatactcagaagctgtgagagaaacttggtcaatatacgtacgaatcttggtttcctacaaactaaaaaaaataaaagctcctccaaaaagacttgacgcttgactcgctctcgcctttcgtcttcaaccttccgagtccgatccatccacgaagtgttgaagctcattccacgaggtgaaatcgcgtgcgttgcttgactgtcgatgacgagccatgcgctctcgtgctccgcgctgcccattcttctcgatccaagtcgcgaatgcatttagcgggcaaaccgatgcagcagtcgaagtcgtctccgacatcccattcgagcttgactggcgacggcgtaacgttaaagaacgtgtctgtcgctgggtttcatcagttcggcgccgataatcaacagccctctccagtagcctctgacttcggcgtagtgtgcgcaggtacacgtccacagttatcatgaaaacccaaggaaaccgtggatgttaccgtgtaccacaatctggtaacacgattcctgctcatgagacccccttcgccaggaagcctgaaaggacccgataaaatgttacaggtgaagctttgggatcttgacttcaacattgcttttgaagacgagctttgaccatgcgttggctatcgtgggatagatagatagccttatgcggtaaatgatctgtggggtaaagctattcatagtcgagcactgttgcaatattgcctcattcctcgattttcttcagaagccgcacccagtcgtctacgtacacgctagcacttcctcttcgtcagtatcgctgtttccccgtctccaacataacaacgatgcttggctgactctctcgggtacttcgacgtcgccaacggcagggacaaaagggaccaggcaaggtctagtgccgttggcaagtctggttgacgagcgatcggtgtagacgaaggagacagcaacagcgacgaggaagtggggtagactgatgatgaaggcgggtgtagcataacatgtagtgaagccgacgtggagagctatagcgcgacattccaagcctattaaatatagggggtagtaggtaactgtgaccattgtgaaccaagcggtaccaatgttactgttactgtgtacctcgccgaggaaacagtggatctgcacacactacttcggcgctcgcgctgtcgactatgacgcgtgctgccatcatcgttacgctggccactggtgtgtgagcgctcactgggcacggcgttgctttgcttgccttctgcatcaacattcgtacgagctgcaggagaccttggtgccgcaacgtccgacacgccgataattgagcgcttcagacgatggagctccaccagcaatgccacatctcggttggagtgtagccgcacgttggacgctcgacagaacgggcacgataagctttggtcaagcacttgcaatattgcctgggacgagaccgtcttcccacagcattcgctgacaaccgtgtcatcaaacagatcgcgcgagaccggacacgtcaagactgccgcgcgctctcggaggtgggccagactaacgtcacgatacgcttgcgctgcatcgctcgcttgttccagaagttgggctcgctcgcgctcaaactcacgcaactgctcttcaagacgctggttaacaccacaggctgcggtgtcatcagtaggtaggggagttgcagtggcctctacatcactggtgtcgagttgttcggtaatacacctttgctcttggtcgtcagtttcttcatgattccttgccatttgttcaggacgttgcattcgttcttgctcaagcggcgtgtttcggtcttgcaactccatcccaagctgctccacactcctctgaagccgctcctggttctcgtgatcacgtcgtcgctgctccataaatcgattcgtagcctccgagaaggccgcctgctgctgccgaatctgctgttgcagtgttcgcactagctctcgtagctgagcttcaccttggatgcccttgttaagcactcgttgcagctggtccgcgcgttggcgctctgccacgtacgcagtctgtagctcgttcacctgccggtttagtcgagccaccacttcgttcttgagttgaagagttttccccacggccgctagctgctgcatgtgttgaacctttgctctcacagatgagctgcactcacttcgcagttgttgctcaagatctctgagctgctgctcaaggaaacgaatgcgttcagtggcttcaggctgcgtagacgacatgaattcttcgcgtagagttaggagctcttgtcttttgagaatgaaatgctgagcaaacaaaccaacggtcgttgtgcttattgttgaacgcctcgtctcatcatccgagcgcccgcgcagcagtgtggagctcctccgcacctcagcgtcgtaggtataagatctaggtattatcgccgttgcagagtacgtggttgcattttgttgctggactgtaatgattaggtaagagggggttggaggatctcgggaagtccactggcaacaccgttccctggctgccacgccttcacaactactatgatgtacgctcaagcataaaatttactacattaaaatgtacatgtagtaccgttacgagctatttgtccctcttagtttacgtctgccaacttcatcgtaactccgtgccctacaacggctgcacctctgagtggaacagctccacggactgcatgcacgcgttcgtgcagtcattatgccgatatttatgcttgctgccagcggccaactacaggcacatcgcttcgtgtgtgaacaagaggctacttaccctaccgcaccatgcaactgcatcgtttcggcgctcaacgttgccaccgcgtccgcggcaacgatgccgctgtgacctgaacacttttggccaattgtatggcgcaaactagtgtccgacaaactgtcttatgttttgacagacaatatgcaatgtagccactggtatacaaaaaccaagatgtagtcaaaacgcgttgatcggaaaacgtaagacgctgtcttatgataggcattctggggctaagtatcgtcttacgaaagagcattaatcactcttgcaacataccgcaaagtcgagaactacagtagctgtccagtggcgtcttagagacttagtaatccgagtccgagtcgaagtatccgtatccgtacgggtaaggattgaagccgtcgtcgaggggtgcgcggccatagcctgtggaagtgctcgactgcgtcggcgcggtgtttgagctcggggcagaccgatacgatgaactgtcaacgtcccgtggcacccagcttcggatataggagtagtcggtgctactagctggcgccgccgcatttgccgttgaagggcgagaatcataagaccacgactgggccgacggtgtgctttgcgcgccactcgcacgcgagctagccgacggcgttggggacgagcttgtacgtgaagaacgatgacggcgagggttcgaattccgtcctcctcgacgccgtcctcgattgctgcccggtggagtagaagtcgacatcgtgttcgattgggtggttgtcgaggacggacgatgagggacggcagctcgagcttggacgcgttggttgcgctggttcctgctctggctttgacgcgcggccaccgccaattgacgcaattgagtgggtgattccgttgctgctgttgctctttcctccgtcaccactctcgcttcagcagccgccgtggcgctggctgcagcagtatccggcagcccaaggagtgagcgttcatggcggtgcagctccaccagattggccatgtcccgattggcataactcgccactctgtgagcgcgacacacggggcactgcgagttgcgcctcagcgcctggttcaacgcttcggacgaaaaggtcttgccgcaacattcagtcaccactgggttctcgaacagatccagggatatcggacacgtgagcgccgcctcgcgctccgtcaagttcctgcgactgatgtcctgctgcgtatcggctgcggcactggcttgctccagcagcagcgctcgctccgcgtcgaactccgtctgcagctgcgtcagtctctgggtcagatcttgcgtacaattgggactctgcgccagcgtcaccgtccgcgtgctggtagcagcacaagcagcggcagcagagtcctgcgacaagtccacgtgctggcctcgctccctctcgtaggcgtccaacaggccgcgtaactgcggtagcaccctattgagggatgaatttagctcgctctgggcattcaacgtgacggtcgcctgctgctgcagacgcgcgcgctcctgctcgaactcggcgctctggtccagcagctgcttctgcagcctctcgacggaggcctggagctgctctcgctcttgggcggtattgtcctcctctctgctgctctgctgcgagccgacgaacgtctcgaggcgactgaccagctcgttcttgcgccgcagagcgcgctgcatctcgtgcggcggccggttgccgtagcactggttgatcacgtagccgagctccagcaggagggacatggagtccttggccagccccagcatgagctccttgcgcgcgatctgctgctgctgccgcccgcgcgtctgcaccatcttcaggctcaggtgcactttttggaagtgacgttttaggaccatttttttccattttatagattttctactggggaaatgacccatttcagtacaaaataggcacatccacttcaacttgccctattacatgtactgcaacctaatcaaaatcagtgggcggctcgagcttgctgcgtagcaggcacttggacccggtcttccagcggtacgtaaagtcctggacgaacaagttggcggctcgacagcctcgcagatgcagcaggaactcctcgttgaactcatgcagcgccgcgtcggagaagtcggccgagcccacgcacacgtcctgcaggttggcgaccacgtagttgaggttcatcttctcgcacgtggccttgcggtagttgacctcgatcttgttgctggcgatgaacagccgtggccacttcgggtccgcgtaggcgtgcttaaagtctccaagtagactttgacgtggacgtcccggtccgctgctgccagaatcgctttgcccagctcgtcctccgccacggagcggacggccacgtgcagcgtgttcagggccccgttgacgcactccagtagagtggactgtagggtggcgcgcggtggctgggtgggattctcccctgcatcagtaggggcgtccttcctcggcgggtggaagaccacgtcgacgagcagatcgtcctccggacgaggggggtcgacgggtgcagggtgcggcccggggcggcgcggctcgaggtcgtgtcggcccttccacagacccgtcatcgttccttggctacggtggaagtgctcggcaacgtctttgaacgggacggcggccttgccgtaggtgtcgtcgatgtagtgcacgatctcgagccgctgcgagcgatgagccacttgcaacgcggcagttctccgcgccgctgcctcgttgccgaggtgccacccacgcatggtggggctgtgtgccgaggggcgcgactggcggcgcgcgctgccagggctgtcggagccgtcagagctgctcatgctcacgtcgtccgctatcttcgcgcgcgcttgacatccttctcttcctcgatatactgggggggagtgaaatttaacaacaacgaaatttaacaacaatgtggtgtcgaccagctgaaggtatccgatagtgaacgaggatttgtgtctggactttcgtagttgcatgaaagcctcgttgctagtacttagtacactttagtcggtgtcggaggagctatctaaggtagaggggacaaaatctcgtcggagagctcttcgccgccggcgagcactttcatccacctgcctgtcaaatgcctgaagataatcgacctcgttcactgataggcggcgataataatctgaagctctcgcgagtagttcacgggctgataaacgtggtgtggcagcagcacttggagttcgggagtggcgacgagcttcccgggattgcatggctgtagacacagtttctgagtccgtacgggtggagtgtcgatggtgagggacttctgagcgttcgtgaacccgctcactgcgatgcgcacggtggcgactttggcgagtagtagagtgtctttctctatgagatccgcttctagacgtcgaagtagtcgaactcgctgtgctgttcgcaccagttgtcgcagtcgctgggctcggaggtgggaggtccggcaacccgagcacagagcgttcagcacgatgcagctctacaagcttcgccacgtcacggtttgcatggactgatgcattaggcgaacggcaaaagccacaaaacaaactccgcctccgtgcttggctccatgcatcggacgagaaggtcttgccgcagcattcggtcacgacggggtcctcaaacagttccagcgagatggggcatgtcagcactgcctcacgctccatgagttgtcgcctgctcacatcctgctgagttctagctgcgtcactcgcatgctgcaacaactgggctcgctcttgatcaaacgcgctacgctgctcattcagccggttgctcaagtcttctccaggtgttgcaacctggattgcaggtgtagggtcaaggaagctctccgaacagctattgccgcgttcatacgcctccatcagccagcgcaagtgaggcatagcactctccattgacgagtggatgtcgccatggctacagtttcgttgactgccttgtcggggcactcgggtccgctcttgctctagctgttcctgcagccgtttctcgagctcctccactgtggtttcaagacgcaacttgtccgcgttcgcctgcctttcaacttccaacagtctcgcgttcgcctgcctttcaacttccaacagtcttgcctcggctgatgttttctggtcgcgaatgtgttgctgaagagtctcgatttgtgccttcagctgcacctcctcctgcacttgcccggcgctgctgtcgaccgcacgctgcagctcatcagcgcgctgtctttccacctcacacttggtcttttgctctctaagctgcccctgcagttgcttggcgtcgctctccttgcgttgcagagtcccctccatctgcctgatctcccaccacaagcgctcggtcttgctcgcatgcgcttggctctgctgctccagttctcgctccaacgcccgtttcccttgctccagcttctcgttctgctcctgcagttgctgcacgcgcctgcggagagctggaacgatctcgggcgctgcggaggcggggtcgtccgcgccgtggatgctgctccggtcatgatacgatctacgatggagagaggatagtgattggctgactgtggtatccgcaggcctccctaattgggggcccatttcccccactatacctgttaagacccgttcccatcccccacaaaaatactatggatctgaggtgacttcatgttggcaagctattttcagataattatgtggcttgataagcatcgagctcactcagaccccaaacaaacaggaacatacccaggtggaagcgtgtttctccggtaatggatcgacccccaaaccatccccactcatcataaatattgtcaaatttccgtaattggtggtattggcaagtagcatttaagctcaaacggacggcgagctgaccgcgaactggaagaggccgttggtctgtaggcgatgctacagaagaatgcaagtttaggagcagttttatcataggctatgttaataaattacatacttaatttaactaaagcggcgtcaattcgtaagccctaccgatcaagcaaagttacagagctagtcaaaacttttatcatgattagtgatatataattcttccgctgacattcgtttctagctaattcggatgaaccgtaacactttgaatatcgtaggttgaatccaaattagcaccggctatgccaatccctaagatatttatcttactttcactatcgtcccccaccatacccattttaaatcctcaagtcgtccccctattaatctaattgggggaaatgcaggatttcccccctattaggggggtatccgtccgtacctctgcccgacggacgtcatgtaatgcacaacttcaattatggcttgaaataaacctcttcgagttacgacaaggaaagtcgacgcgagaagctgtgtagatttagctttagtactgtgctgcgcaggcgcagactccgcgcgacgcgtgacaagatggccgactcggacgagcggctggccgaacgtacggcggcgatgcggctggacagcgcaccgcccccctcgcgtccggcagacctggagatcctgatccccaaccccttcgagcgcagagacgacgaaggccacggtgcgagtgacgccgagatgcctacggcgagcccgaggcaaggaccaagggatggaaggatcgcggcggcgccggcgctgccgcagcccccgatgtacttggggggcaccatgcaagaccggcgcgacttcatgcacaagtacgaggcctacttggtgaaggtgaacgtgctgcagacggagtggacagcagcgctggccatgcccgtgagcgcgtgtatcgagacggatacacgacgcatgatcgctcgctgggagttcagcggagcctcacccgagacgatcacggaggagcagtggaaggactactttcgccaggctctggtgactaccttcgtggactacgcgtcgatcgacacggccatgaagtccctgaagatgcagacgaagtggccggagcctgagagtcgcatgatgcacttgcaggccgacatggaagccatcctcaaccgcttcaacgtcacggacctgatgttcaagcacgagcagcgccgcctggtcggctacctgacgaaggctctcgaacctgtgagcttccgcgaagtcgtggcgaccaagctgacgctgcaggagttcaagccgttggcgaacgacgccatcggcttctgcaggtgtggtgtagtaccccgcggaagaagtgggcgcgccgggcgcggaggaagaaggcgccgggacgcgagtgatggacttcgacgcggctgatggaacgcgacgcggattgatgggcgcgacgcagggccgagctggacgggaaagtcggcgtgggtgatgggccgtgagacacggtgccagaatccagtgggacgcgtaatcatccgacgggtcgaccagtgcacccggttctgcaaaacgcgccgaccctaaccccgccgagcaagacgcgccgaccaaaacgcgccgaccctaacccccgccgaccaaaacgcgccgaggtaagatcttgattgcgccacgcaaaccaggttgaaggacggcagtgcaagcacgacagaagtagggataggcccagagcggtaggcttagcaagcagtagtacagagtagccagtagcaagtagcaaggacataggatagggtaaggactcagtcccgaaatttctctgaaccacaaagacctcccgtcttctccgaggttccaggggaaccaccaagcgcaggcaagtagagccgcctcgatatcgcggcccctcgtcgtttgctgattcgggtgctcaacccccacagacccgtgctggaacaaaggcacgttaaacgtataccgtttaggtgggcgcccgataacgcgctgcctaggcgaaggaccgcactggcctgataaccgccgtgcacaagaccccccgtgtaggcccgataacgcgacacaagccccaggaaacgccggcccgataacgccgcacgcccaaggctcgacgccctacgagaaggaacaagcgtcaacacaagaacctccccaactccgaagcctgcgaatacttgggcctgtatttcgaagatacgctactccaacaaccgggaataattcgctcggcgcgaccgctatccagacgcgccgagtttgtgcgagatcgcattcgcgagatttcggcgagggcgctactccacaatggtgccgcgacccgggagtactacttcgaatgacgggctaacgatccaagaggcatcggaggcaggtgcgcagtcggctggaaggtcgccgaccgcaagagagcacagtgagagacctgtcgcatcgtggagctctgagggaaccgtcacgacaggccacggggccagcgacgaccaggagggctacgaagaacagtttgccgttcccgatgcggctcccaacgagggagccgcgaagggccgcgacgcaagtcgcggtcctaccggtcggaagtctgcaaaggacgacgaccaacaacaacccaccgccaaggcagccacgaagcgcaagccgcccaagaggaagaaaaagaagctgcgcgcgccggactcggcggaggagtcgctgtccaagctgcaaggcaagggcacgggacgtcagtacaccgtcgaggaggtacggtacgtcgtggcgcgcacggagctcttccgtctgctagaacaagacccaatcttggtcttcctcaagcccatgctgatgagcaacttcacaggccccttcgtggcgccggactttgatagtctcaccagcgttgcccacgccgcgccgactctcttccagatgctgcgtgactcggggttcgtgctgggggctttcgagatggagaggctgtgcgattgggacctcaaatcttggttacgtgcggttcgcgtcgtgcaggagccctcgccaattctcgccggatccgtcaaacaagacgcgacgagttccgcgacgggccaagaggcgccgagcccctcggcgggtccagcccagacttcgacgaccacgccctcgcctccatctcgataccaatcgagcgtggactccgacagcagtttcgagtcgcccaagcgcatgcccatgaaccggccgccgcgcgtcatgcagctatccgcgacgcccatacgcacagaggtgacgaaacccgccgaggaggtgcttcccaaggccttgagagaatctatcatcaagctgatgcagacgacagtgatgaacaccccgcgcgccgacacagccgcaattccgacggggccgaagccgcccgcgaatcccacacccacggtgactcgcccccaggaggcagcggatgttgccacggagtcggtcagttcgcgttcttcgacgaggtccagaactcgacgcgacgcggacgaggaccccgatgacctgttcgacttggacatcggagtgccaagaaccacggccgccgtctcgacggcgacagccggcggcgtagcccccgcccgcctacgcctctcagcatcttccgagctgaaagagttctcgggacgggacgccagcgaagagaaagccagactgtggctcaaccgtctgaagtccgccgcgccgcgcgacgggatgacgggcgaagaagtgtgcgggcagttcagcgatctaatgagcggccatgcgcgccaatggtatctccagttgcccaagaaggtcaagaaatcatggaccgagctgatggagcaattccgggtgcagtactgcggcaagggcgtgtcaatggccagtcgctactaccatgcggctcagcgccccgacgagacccctctggattacttgtaccggctcaacgtcgcgggcttgagggccaacatcccatacgccgagggcacgactgaagagaagcgcgaacacgtcgagcatttcatccggacgctgaacacgcaggaggccgaactcgcctcgcgtctgatgctgatggaggtcgccgactccgaggcgctggacaagaagctgcgtgcccgacaacgtggattggctcaccagaaaaagactctcttcggctcgaacaagttccgccaaaaggcgccgaccccgccgactcagccggcgcgcgccgtgcatgcgatccacgtcgcgtcggacgagtacgactcggaacgcgaaagtcgcgacagcgacgatcgccagtgcgaccaagacgaggcggacgaagaacgcgccaagttgttcgtcgcgggacaggccccgccgggagagccggcgcgtcgcaacttcgattccgacggctcgggacgcgaccgcccgcggtgccgctactgtggttcacgtcgccatgtcgaaggagactgctggaagttgttgacgtgtcagaagtgtggtggccagcacccgacggagcgatgcgtgagggtgtgcaaggcctgcggtgacgtgcccgaagccggagaatgcccgatggaggagttcttcaaccaattgcgccagtggtttgacccgaataaacacgcaggaatgctgccgccggccgccgagaagatgttaaactaggacgctcgctggcttggaaaccagtactagacgagcgacctgtttccgtctatgcatatgtgaccaagaagtcgagagaggtggttagtgagagcccgacttccctgaatgataatacatgtgaatccaacctggtacgtaccacgcaagaacgcgccccccgaatctcggcggtccgacgtacgacggacgacgagtttgcacgtgaaccacccctggacgagatcgacttgcaaccaggagagcgacgcggatactggaaacattacgcgccgcacaagtggtacaagcaggccaagattcatggaaagctgaacaatcgccgtgctgtgttattgcttgacacaggtgccgaggtgtccatcctggacatcacctttgctcgtgaggtaggctgcctgattgacacggaggtcacgcaagagtgtgtgggaattcgtgatgagacatattacacggtggggagaaccagagtcaagattaccttggctggaaacttggtgtactacatgcacctgtgggtcggtgacttggtcggccaacacgcaatcctgggaatgaacttcatggtgcccgctggagtgcgcatcgacactgcggacggcacggcgcgcctccccgacgaggtgcatatccagatgatcggacgaagaccgctatacggcgcacggatgcacccggtcaacgtcaagacgcctgtgaggctcgaaccaggagacacgcatgaagtcttgctgaggccggatcgaaacgcgccgttcctgtgggtgacacgggcagagtcgtgggtgactacctttgtcaaggggagagtcggaaagaaaacgtacctgcgtgtcacgaacatcggagacgcagcgataaccctcgacgcgcatgaaacgcttgggtggtgggcgccgtctgacggccaacctcggaaccgtggattcgtccgactgggctccgcccggtaccagcagtggcagaatctggcgtacggcacgacgcgcgacgcggaggagaacttgaacccagccgagctcgacggaccgacgacggatcgcccctcataccgacgcctaaagccatcttgcgcccggagccgagacaactcgggccgtgaccccagtgttggcggctgtcgcggaagcgccgaagggaaggggggtagacttgccacccgacgaccacaagccggatacggacgaggaggcggtggaaagcgaacccgatatgcctccgactgtggctggaagcgctgcgatggaagaatcgccggagtcggaactcgctgagccaaaactcgacggaccaaaccccgccgagccgaatttcgacgaggtgaaacctgatgagcaggaagaagacgacgcgatcctcatccacgaggggtccgacctcttcgtagaggatctcgagtctgagatggcagtgctgccagacctctcgctgaccgccgaggtgaagatcgaggacttgaaggtcggcatgccgactggactcccgcccgaggaagccgcgagacaagaaacgcggctacgccaaatcatctggaagcgacggaagtggttgatcggcaaaggcaacgccttgccgccggccgccctgggtgttgtctgcgacatcgacgtgggcgacgcaaaacccgtcgcgcaacgcgtccggaaaatcccgccgcagtttcaagagaaggtcgccgacttgatcaaagggctgctgagcgcgaggatgatccagaagtcgaagtcgccgtgggcgtcgcccattgtcgtgatcataaagaagaacggcgtcgatatccggctttgcattgactacaggctcatcaacgggctgacacagttgatgatttaccccatgccgcttgtcaacgacttgctcaaagacttggacaagtatctgtggtactgctccctcgacatggcgagcggcttctgggtcgtccccatgacagaccgggcccggctcatctcagccttcatcacgctgacgggactgtacgaatggctgcgtatgccgttcggcctgtgcaacgcgccgcagatttaccaacgcttgatcgacaacgcgctctacgggttcacgaagctgtccccggatggcagcactcgggacgtctttgaagacggcgaaccggtgaagccaggtattcactccattctgggacggaggtcgtacatcgacgacatcctcatcgggggcacgtcgtgggacgacctgtgcgagaaggtcgaacgcttgctggatgtctgcgagcagtggcacttgtccataagtgtcgagaagagcgagtggggcatgtccaaggtcgactacctgggccaccgagtctcaggactcggtctcgaggcgaagccgaagaatctggagtcgctgacgtcgctcgagttcccgcgcacgctcaagggcctgcaatcgttctacggtagcctcaattactaccaccggttcattgcagactttgcggtgtatgcaaccgtgctgtattcgctgacggagaccgatttcaacgagtacgtcacgcgtccagaagtccccgggcatgagaagtggacgcacgcgacgcgcgccttcgacgcgctcaaggcaaaactcgccgagaccccaatgttgaagcacttcgacgcgaaccgagaatccgtcgtgatcgtgtacgccagcgactgggccatctcaggggtgctcacgcaggtccacgacgaagtgtacatgcctgtgaagttcaccagtcgtacgttgaagcccaacgagctgaactacgacatcgtcgaaaaggagatcttggccctgttgcgcgtcttaaacgagtgctacacgatgctagcagggagaccagtccgcgtcttgacacgtcacacgacactcgcctggttgttccggtccaaaggactacaggggcgactgtcacagtgggccgcggtcctctcgccgtggaagttggaaatctgccgatccatgaagggagaagaagaactcctcggcgcgctggccgcgagcactaccccgcgagccttcgtcgacgcgacgctagaagagattgccccaccgagacgggcgtccagtattgtagtcattccagtccccgacgtggcgcacgacgaggtcttgcacgttttgagctttgacggatcggccaaggcgaagcgagaaggcggagcatacagtgccgtcatttggcagctgccgaactgggagatcgtgcacgccgcgtcgggatatgcgacggacctcacggtcaacgaggcggaataccacgggctgctgctcggatgttctcttctagaggagctcgacgacgtcacccgactcgtcgtatgtggagactccaaccttgtcatcaggcagatgcgggacgagatggactgcaagtccccggggctgaagctgctgcgacaaaagacgcgaaacgcactccaggcatggccgcgccacgaactcttccacgtacgacgagactggaacgtgagtgccgacatctggctggacaagctctgcaccgtcaaggaggccgcaacgtgcacagccccgaagacgctgaatcgcttggaagaagtcatccgaccgcggacatcgagtcccgggatgtcgtctccagccagtcccgacgcggataatctcgacgcggaaaacctcgacgcggaacatcccgacgcgaaaacgcgcggcgcagatgaccccgccgggaaggccatggacgcgggacgcgggacagcacaagtcctcgctgtgacgacgcgctcggctgctgcacgcacgacaacacgtagggtccgacctccagaagccctggaggagctggtggtgcaacgaatgcgcctggaccgcatccgcgtcgcccaggacgaagaggtctggatcgtcaacctcaagaagtatctccgcggcgacgtcggggacctatctcggcgcgaggtgaagaactgccaaaagcttccgcctcagtacgatgagggcgaaggcgggttgctctactaccagccgagaagcgacgattccgccgaggatcgcgatgtgatgatgaagctggtgatcccggagactcttcgggaagatgtatcacgcgagcctggaaggcggacaccagggtattggccgcacgtaccaacgcgtgaggcgccacttccattggccagggatcttcagaagcatccagcgctacgtcggcgaatgcaccgactgcgagacgggaaagggtcgaccgaccttccagggcgagtcgccgggcaacatcgtcgcgacgtacccgttccaggtcatcgccatggaccatattccatcgttgccgacatcctacaaaggcaacacagagctgttagtctgggtcgacctcttcacggggttcgtcgtggtcaaagcgaatgcgtcacgaaccgcgcagacggtggccgaggcgtacgaggaggcggtgttcaggcgcttcggcgcgagcgaggctatccgccacgaccgcgagccgggcttcatgtccgacttcttcaaggcactcagcaaactcatgggtcagagacagcgagcgatgcttgcttatcgtccccaagccaacggtgctgcagaacggatggtgcagacggttacaagagcgatcaagatgtacatcgcagacgtcgaccaacatgactgggacgaatacgccgagcgtcttaccttcgcgctaaacatgtcgcacgaccggacgaggaatgaaaccccgttcttcttagtgcacggctgggatcctcggtcgacgctggccgtcgggaacacgtcgacccgggactccgaggcgaggcggtggaggctccgtattcagcgacactacaaggtggcaagggcacaagcgttggagttagtccgagaggccgtcgaagagagagcgcgtcaccaaactgaaatcgcgacgcgacatgagatcgcaacgggctcgcaagtttgactgtacctggatcgggtgaagccggggtatgcgcgcaaactcgcgcacatgtggcacggacccttccgcgtcgccgagctggtcagcgcgttcgcagtgcgcctcgagacgacgggtacatgtaccccgtcgtccacatctccaagctgaagcccgtccgggaattcccgtcgcgacccgcgacgcagctgacggtgccggccgaggagcgcttcgacttcgacgaggagctcttgccggaggatggctgggaagccacgcgcgagctggaggacgacgtcttcgaggtcgagaagatcgtgaatgtgcgcgaggtgcgggctacccggtatgggcgcacgcgacgcgagttcgaagtcaaatggaaaggctacccggacacgacgtgggtcgacgagctcgatctgaattgcggcgggttgctgtacgacttcctgcgccagcgcacgggacgcaaccggttcgaggcgatgcagtcgcacgagaacgcggaggcggtggagtctggtgggtgagcgcccgcgggtgcgactaagtcggcggggggctgccgacgggaggactggtgggaagcctcgactctgggaatggcctgagcgagggattggatgagggaagtgaggaggaccagcctgttgctgaagatgggacggcggagggccgtctcataaaagatgtggagaagtggaaagaaacaaggggaaagatcaaggctacgtgttgaagttacggctacaacaactaaacgcgacggactacaacgatgggccaagactcaaacctgctggacaaacttacctgcaagacgcggcacatggaaggctgggtgatcgcgcgtcactcggcagcgtacgttggcgtccatctcggccacagtgagtggcgttcgatagaaccggcgccagggctcctgcgcgtcgatctcgtcgagcgcggcttgcaacgtcgcgtgctggtggcctggataccaccgtccgatcgacgtgtgcgcgggcggaaagtgaagcaccattgggtccagcaagaggtccatgtctgcgagcccttgctggaacagcccgaccaccagctgcaacaggctgttgaggtggttgcccgcgtgtgagcgacgcgagttgcgcgccgtgcgccaccttttccacgccgcgccctgcacgaagagcgcatgggtggcctcccagttacgcctgagcccagtgctcgatgtggtgccggagccgaggtaggtatgggcgaaacgccgcgtcgccggacgcgaagagaagagaagcgcctcagcggcttgagcgaggtagcgccacggccgagtcgcgtatagcgcgtcgacgttggccagagtcacgagggtgcggttccagttcgcaggcgctgggggaacacggcgcggaatgatccagccgggcggcggcaggaagagcattcgcaactcctgcacggtgatgagatgaaggtggagacgtcgtacccgcttggaccaaggagcgtagcgaggctgccgccagccagacggagttccggcaggcggaatcacagggtcgaagaagggcgccgtcggagcactccccgccgagccgctagaggcggtgctcgaggacgaggcgcgggacgacgaggaagcggacgagtcgttgccactggagtcgcccgaatcgcccggaccagtgcctggtccagctccggctgccgcacggccctcgacgaggagtgcgtcggccgtgcaggagaattgtgacgcgaggccgccgaccccaccgagtgcgtcaaccccgccgcgtgcgccgaacgcgttgagccgaccgaacgcgtcgacgccaaggagggcgagcgagaacgcgagcgcgagcgtggaggcgagtgcgaacgcgaatgagaggccgagtgcgcgtgcgtggcagcgggacgaatgtggtgtagtaccccgcggaagaagtgggcgcgccgggcgcggaggaagaaggcgccgggacgcgagtgatggacttcgacgcggctgatggaacgcgacgcggattgatgggcgcgacgcagggccgagctggacgggaaagtcggcgtgggtgatgggccgtgagacacggtgccagaatccagtgggacgcgtaatcatccgacgggtcgaccagtgcacccggttctgcaaaacgcgccgaccctaaccccgccgagcaagacgcgccgaccaaaacgcgccgaccctaacccccgccgaccaaaacgcgccgaggtaagatcttgattgcgccacgcaaaccaggttgaaggacggcagtgcaagcacgacagaagtagggataggcccagagcggtaggcttagcaagcagtagtacagagtagccagtagcaagtagcaaggacataggatagggtaaggactcagtcccgaaatttctctgaaccacaaagacctcccgtcttctccgaggttccaggggaaccaccaagcgcaggcaagtagagccgcctcgatatcgcggcccctcgtcgtttgctgattcgggtgctcaccccccacagacccgtgctggaacaaaggcacgttaaacgtataccgtttaggtgggcgcccgataacgcgctgcctaggcgaaggaccgcactggcctgataaccgccgtgcacaagaccccccgtgtaggcccgataacgccacacaagccccaggaaacgccggcccgataacgccgcacgcccaaggctcgacgccctacgagaaggaacaagcgtcaacacaagaacctccccaactccgaagcctgcgaatacttgggcctgtatttcgaagatacgctactccaacaaccgggaataattcgctcggcgcgaccgctatccagacgcgccgagtttgtgcgagatcgcattcgcgagatttcggcgagggcgctactccacacaggtacgtcgtggagctcatgcggggcttcatgacctgggagcatgcagccgaagctgctgcctgctccagcactagcagctctggcgggcggggcggcggtcgtaccagcactacccactctggcgggcgaagcggcggaggtcgtggcggtggtgatacaagcgccgggcagtccggtggtggtagtcaagccggtggcgatgccagtaaccggaccagtggacgcggcagcggcggacgtggaggtggccggagtggacgtggaggcgcaggtggtcgtgttggcggagctggaggcccgcctgtcacaaggagggccggacggcgccgcacgacctcgcggtgtctgccgcaagtgtggctcgacgcagcatcaagtcctgagctgcccagacacccaacccggtgaggccgaacgcctgctggcggaactgcgcgcgcggcgtgcggctcctacaactaccttgcgtcgagtcgagaccgtggccgagcctggccatgaagctgcggcagcgacagagccatcaggcgcagttgaagcgcgagtggatggactgaaggtccacgctctcctcctcgatacgggggccgacgagtcgttggtcgcccagggcgtcgtggacgccatcaaggcccgcggaacaccggtcttcttggcggacattccgccgcgcacactgtcgccgatcggaggcaaggacttcgtcgttcatcaggcagaaacgttccgcgaggtggagttagccacgtcggccggacccttgatgctaaggaacttggcttgcctggtggaagacggcaacacgtcgctggacttcacgctggggcggcccatcatgaccgtgctcggctactcggccgacgaactgctcgcgcgtgctcgaggcactaagtcggagtgggagcttggtgacaatgagcaagtgggggacgacgccgagacaacggcgctccagcgcatgtgccggatgcagacgcacgcaagagacatcgcgttggacacaatggccctagagggactcgtggacaacacggcgcctaccgaccaggactggggtggcagcgacacggtgcacggcggcacagactcgcccgagcccatcttcaagacgaagaacctcacgcccgcttattggcagttgcccctgtcttcacgtggggcccaagtgctggcctttcagacgcgggatggctgtccgcgtttcagtcgcgtgcccgcaggagcccacgcgacagccaccgagaatgccgatgctgtggagagacacgagacccgcacgacgttgccatcgctccggttgcatgactcgtcagccgtgcacgacatgttggattcgaagctcgcggcggcgcgagcgaagggtctgtccgcgaagggggtcaagcgactgcgggagatcctgctgcgacgccaggatagttttcgtctggagtttgggagcgacccgccggtgaaagtggcgccgctgcaagtgcgcgtgaaggtcaacgcgcagcccacgaaggcacagccaaggcgctactcaccggacgacagggcgtttcttgaccgccacacggccaagttgctggagttcgggctggtgtttctgaaccatcgctcccgttgggcgtctgcgccgcggattgtccgcaagaaggagcaggactcggatccgacggccgacccgcgaatgacgattgacaccagaggcgtcaatgagcgcacggaggctatgccgtggcccatgcccgtgctggaggtcgtcctcggcaccttgaaaggagccaaggtgttctttgccttggactggttccgagggtattggcagttgccgctgcacgaatactcgcaagagctcttcacattcatcacccaccgcggcatgtacacgccgacgcgcgtatcgatgggcgccaccgatgctgtcgcgtactgccagggagtggtcgaagaaatcttcggcgacctgttgggcaacggcatcctagcgtggccagatgacatcctgggctatgccgagtccgaggacgagctgctgcagccgctggaccaggtgttggctaggtgtgaagcctacgggctgaagctgcatgctaagaagtgtgacttcttcgagattgaagtcaagtggtgcggtaagatggtgtccgctgctggcgtacgccactgccccgaccgcgtgcaaggactcgtagagatgcagccgccgcagacggctggcgatctgcaacagttcctgggcgccgtggactggatgcaacagagcattccagagtagatccgactgacagccggtctgtatgccgtactggaggaggcgatgaaggcggcgggatcgcggaagaaggtcaagctcgccaagttcccgttggaccagatcggctggggcgacccacagctcgcggaccttgtcgctgtgaaggctgcgctgctgaagatggtaccgctggcacacccgagcccgacagctgaggtgtgcctgtataccgacgccagccaggactcgtggggagccgtggctacgcagttggagcctggtgaggtccagctgccactggaacagcagcaccatcgccccctggcattcctaagtgggcgctttgtgggcgcgtcgaaccgctggccggcgatcgagaaggaggcgtacgccattgtggaggcggcgcgcaggctggagtacctgcttctccgtcctggtggtttccgtctgtatacggaccaccgcaacctcgtctacatcttcgcaccgtacgggcctgacactgcgatggatcgctatcaggcagacaagttgcagcgatgggcgctgtcgctgctgagcttcatctacgttattgaacacgtgccgggagaggccaacgtgtggggcgacctcctgagccgctggggcgccacgaagatgcctacggcagcgccaaccggtgccaggatgtcaagactggcggctgttgaacgcgtcagcccactcgaggctgtcgacttcgtgtggcccagtgaggacgagatcagggcgacccagctcgcgagaagggccaaggactcgatggagccaagccagccgccgctgtgctggtcggatgactggtggcttttcttgctagcggatgagggcatgtggatccccgatgatgctgtggagctgaagctacgactatgtgtggttgcgcatgctggtgctgccggccatcgtggagccaaggccaccgcgaaggcactagaggacctgttctcgtggcgctcgctgcgcaaggacgtggcggtgttcgtcagcgagtgcatgcactgcatggccactgcggctgggaagatcccccggccgctgggcgagacgttgcgggcgaccaagcccaacgagcagctgcacttcgacttcttatcgatggcggaagggtattccaagcaaactgatcacggatcctcgaaagacctataaagaacttttcgatggcatcgaccaagaatttgacatgactgcagcatgtccaattaagatcgataacaagagccagcgtgtcagccgaagacaagcatttacacgtattgtcaaagcttaagtaatgtaatatagcagagtttagaccaacatggaaactcaatacgtagatgatttcaacgaaacggaagaggcgtatgataataattacgaagaatgcatgcagagcccagttaagaagatcactaaaaaaagagagacgtctctactcgtccggtccgaggggtcgcaaccgcaggcgaatgacccctgggggcatttcgccagagcgccagctctatatgaatttaatgatattgctactcgtgctcgtcctctatcgccgaagcaaaaaaagaagtaccaaggacttctgactttgcatccagacaagctgatgtttggaacaattgaagattattgctcgtataaaaaagcttggagcgtaaagtcgtctctccaccaatgactctacgacccctttacctcaaaaatctccggagagatctccaagtaaagagtctaccaaaagatctccggagagagcttcccagaacgtattgcggtactctgcggagagtattgttgtaaactctatcttatcaaaacatcttatggaaagtatagctaactgcaaacgctaatgattggctaaaatgtgaactaacttttttcgcttccattcctgaactcgacagtcggagcacagcaacgatggaggcgcttctcgctgaaaatgcgctgctacgtcagcaggtccaacagctagaagcccaactcacccacgcgcaggaccaactcacccacgcgcaggaccacgcgcaggaccaactcacccgagcgcaggcgctgctggatagtgagcgccaagaacgcgctgaagaccttcgcagccaccgccgcgagagactggctctcatcaacgatatcggcgggagggttgatggtcttctaaccacgcataatgaaacgaaggacgctatcattgaccgtttggatacactagaaggcaaactcaccgacccgccatcacctccgaagacccatggctttgcaattacctcacgagctctcgccggtgacctccaagagctcaggtttatcgctggccaagccagctatgtagagcgacggattaatcaggttgaaggcgatgaggaggtgattgtaccattcaccatggacggcaatccgattgatttacggaataattttcagaaggaagctacacggtcagtccgggcaaatattggtcgggtacgttcaagtccaagtatggagcttaacaggtaccatcagggcaggaggaagcgggcgcgagaggaatcgagttcaagtgttgcaggtcgaaagtcagccaagacctcatcgaagacattattaaccgagtcctacttgactgcattgcgacgacgccgtcaaatagagcctcgccgctcttcaacattcgcgcactagacgtgtatccatcacaccatgcacaggtcaaggcgtttctgcttagacttagagagagtttgcataacgaaaacatgtattaatcgagccacctactgagggatccgcttactacgtgctcccgtaaagatctgcaccagaagcactgggctaacaacatgaggcatagtatgtagttactcgtccctgatcgggaaaaataattgagtggatttctccgatggtctcttgccgcggcacttttgcttgactgttcgttcgttgctcgcaacaattgggggagagttgtaggagtaagaaaaattgagttggctgtcccttgccacagtgcttgagcttagccgttcgtctctggaaggcaacagcattaataggtccattgtactcgcaccaggcgcagcgctcggagtcgaagcgtagcggtgagggggatgaacttcctggggggactcagatgaagccgcagcaattgacgctgtggttgtctcaatttcggtgaagtgtcttgatcgacgatgtggaacttctgagcgtgcatgaactctttccgtgcgctctgtccggtggcgactttgacgagcgctagaggcttctgagcttcttcgcctgtgagagcggctttcagatgccgaagtagaggaacccgccgtttcgttaggaccaggcgtggcaattgatggagctggctcaggaagagcaggggggagtccgagagctgagcgctccgcccgatgcagcttgtcgtaagccacttgagcgcagcgatgaaagaatgaaagtgtggtcttttgcttaggctcgtggttggctactttcctagaacttctcggagtcaaaactattactatcaccactccagcattgtctggccgttggatgacctgttcaacggtggagatatacttgagtcgtgtcacttcacgacagaggcccccatctccggcgtgacaggacgaagccgacgcatgtgcagtgtctccaggtatcgctgcttcttcactacgactgtaccgttgctgcgtacagcatcaacctcgtaaggcccggtataagtaggggcaagctttgctcgccgtgggtcattgttggcgaccatcaccatgtcacctggggcatactcgtgagtattgcgcccagcgttctcacgggcggtagccttggctacctgagcctcctttcgctccttttgagcctcccagtcaaccgcgtgcgggacatcaaacagcatgtcgcgcccgaaggcggcttgtgctggactgcaccccatcatggtatgatgagaagcccgcagcgcgtacgctacagacgacaagcagttctcccagtcttccttgcttgagatcttctcagtgcgcagcttctcgttaatacagcgatgcattctttcgactgtagagttggcttgagggttccgagtcgtagtgggcgccttctggattccataggactccaatagctcttgcaaatcgagtttgaactcagagccaccatcgtagatgcaccgcttcggccgagggtatcggttgaaccagacttgatccacaatccgtgctgcttcagcactggaggggtcgtgctgtgccgcgagttcgagcaggcgtgtgctcgtgtccattatcgagactgcacgccatcgaccttgcagaggcccaattgagtcgactgcgatctcattccagggtcgaacttccaccgtcttctccggaatctggccgtacgcttgcgggagcgttttgctagtcgcacacacatgacatctctgcacatagcgtttaacatcactatccattcctcgccagaagaacgtcgccttaattgactgcgtcatgaccgtaatcccagggtggattagccattcgtggtacgttcgcatgatcggctgctgtaattgctgtggcactgcaatcttcccgtccttggcagtcacaatcagctcttcaccgccaatctcacgcaggacgagttcctcgttcgtcttcaagctcgcttcagcttgtgcctcgcggattgcgcagggggccagcgaaaacagctcagtctttccgctagcagcggccacgacctgctcagcaggcgacgtgatcggcagtcttgacagtgcatctgcaaccacattatccttgcccttgacgtaaactagctccggcccatactcctctatctccagtctccatctcagcatggtccaattcgagaaatattctgaaacgtacagttgcggtgatcggtgaatactttgatcttctgcccccacacgatcgaccggaattcacgcagcataagcagactgcttaacagttccttcttgttggtggcgtactggcgctgggtagcatcacacttctgagaccaaaatgccaatggtttctggtcttgcatcaacacgccaccaagctggtaatcggaggcgtccgtgtagatatcaaagggtttatcaaagtcagggtacgccagctccgtggtgtcactgatcatagctttcacggcttcaaatgctcgttgctcacgctgcgtccatcggaatagcacccgtggagatgtcagcgccgtcaaaggagcgagcgtagaaactcgactgggccacatgtccttgtaataattcaccatcccaaagaatcgacgcagatcgcgaaagtttctcggcgatcaaggcgtttgatggcttccaccttggtgccgatggggcttttacctgtcgtagagatattgtagccgagataatcaacattcgtggcgcagaatttgcttttaacggcatgtaccaccactccagcttcaatcaatcggttcatcacaacttcaatgtggtggtgttcatcgaatgtctgcgagaggattagtacgtcgtccaagtaaatgcggacgtacgtcagatcacccaagagctccgtcatgactgcatgaaattcatctggtgcggtgctaatgcccatcggtagtttgcagtagcgatatttgccccacggtagtaaacggtcggctctgcattgcaatctcgcgactatagtatcccatgactaaatctagagtcgtcacaaacacgggcctcggcagctcgcggagcatgtcctggatcttcggcaaggggaagtatcgtcgctccaaccacttattaagacgtcgaaaatccgaaagaaagcgtactgagccgtcctttttggggatgacaaaagcaggagaagcccatggggaatccttatctggttccaggataccaagtcgcaccaaccgctcgagttccttcaatgtaggcgcgtgtaacttgcgagggatgctatacggggcttgtgcagacgggattgcatcaggtttcacagggagaacatacggtggtaaattcagcttccccaccggtcctacaaacgccaccttaacgcgattgagtgctgctcgtagccgctgttgttgttccaacgcgagtgtatccttcggtatcagcgcatcaatatcaacttcctttccctctgcgttcaggatactatcaactcgaccatctccatccacttcagcgaacaacacggtcgattggggcgcaggagttcccagcggtatcgtagctccgtcccagtgaatcttggctggttcttccagtccagcatgatgccctgctcctccataaaatcggttcccaacatgataggatagagaagttgatctgcaacttgaaattcatggttcacctgtcgagatgctccaaagtcctccaccttaaacggaagatcaatgcaaccataagtatcttccaatttgcctgccgcattttgatactttccttgtggttgttgaggtgtatatcaggacacgatctcctttgccaccattgaagtatcacatcccgagtccaacagggctacaacagtcctcttggagagagggtggcgtagttgcactcgaacctgagccttccgcgaacttgctgtcgtcgtccctgccactgcggcatcgttcacgtccccacatgggatacccgcgtagacgtcgtctaaatcatcttcactatcgtcgtcatggctgggataaaactgtgccgccgccatctctctcttgggtttgagatcagcgcccgtgtctttcttgaagcgcttattagcatttggtcggtagctcagcgaattggggttcctaaaacagtctgcattcttgtgattctgattgaatggcataccttgatcttcacaataactgcagctcttgtcgtggtccgactctcgtttacgcttgccttggctttgctgacttcgaccatcttttgacttagcttggatttcgtgccgactctgagactgacttccttgtttcttttccttcttgagtagcccctcttgtcaaagcgcccgcgttttcctcctcttccagactgtccaaacggggatcttgactcctcaagccgttcacagaccttgtagctcgtccggagctcgagtaatgcatccgccgggttgcgaatggcaacgaattcaactcgctcgcgccaggacgtcggcatccctcggtgaaacagcgcaatttgatcattcacactcacgtttaactccacaaaggctcccaaatccaagatatactcaaactggttagcatattcgtccactggcatgtcccgtgtcttccttagatcactcagcttttggcgaaggcgtgtcgtcacatcaaaggggcagtgtcgcttggtcaacgcccccagtccagccgttagcgcttgattcagcatccctgcttgctggtgctgctggttggctgcagtgaaagctgcattgatgaggcgtaggtcgtggttgaatatcacttgtcgaacgatacacaccagcttgtttgtatcttcatctgagattgtcaactgccaggatgtacgcagttggtccagctgatggcacagctccagccagtccatccagtcaccacgatcaaacactttgaccttgtagtaccccttgacagctccgtcaaacttaaatctcctcgtgttcttgtcttcctttcctcctcccatgctcatcttgctgccacgcacaggtacgcgaaatagaagcttctatatgtcgtaagccacttgagcgcagcgatgaaagaatgaaagtgtggtcttttgcttaggctcgtggttggctactttcctagaacttctcggagtcaaaactatttctatcaaccactccagcattgtctggccgttggatgacctgttcaacggcggagatatacttgagtcgtgtcacttcacgacaagctcgacaagcttcgcctagcatgcactcacgcgctggtcgaacggcaaaaggggcaacaaaagctccgcctcactgcttggttccacccatcggacgaaaatgtattattcggtcacaacggggtcctcaaacagatccagcgagatggggcatgtcagcactgcctcccgttccgcatgactccgtctgctaatgtcctgttgcgttttggctgcgtcgcttgcttgctccaccaactgggctcgctctcggtcgaacgcgcttcgctgctcattcagacggttggccaactcttgatcttcagtcaggtcaataggttctgcgggactctcagcacgtccattgccgcgttcaagcgcctccatcaacctttgcatgtgaggcatagcgtttaccagcgacgagtggatatcgtcgtggtcattgtcacgtctcgcgccttgctgcagcgattgagctcgctcttgctcgaattgtgtacgttactgtttttcgagctcctcgatctttttttttaagaacgagcttatctgagttcgactgcatgtcgtgctcgagtagtctcaccgcggcatccaatcgctgggtgcgagtcacttgttgcaggctctgaatgtgcgcctttagtgcctccacttgctcagtgctgctggtaacaatacgttgaagtctgtctgcacgctgtcgctccgcttcgcgctcgacttcctcctcgcagatacgctcttgcagttgcttgacatcgctgtccttaaactctagagcccccctccattcgcctgatctcccgccgcaactcctcctccctgctcgcgtgtgtttggcgcagctgctgcagttctcgttcgagcctttcactctgctcctgcaggtgctgggtgcgtctgctaacctccgccacctcttcatggcccaagccactcatgacacagtctacgggtgatgattggctggactttggaatgacgagttacaagccgaaaaatagtctgggtaaagtaagaagcaagtcctcaccgttttgatcacgaacggaattgtatcctactatcatggatacgtagtacaagtatttgatactgcaccatcgacgcgctggatgaaagccgatcatgggtaacagttgaaatgtcaccagttcgcaggcatcattgattgaaattcatcggatctcttcgtgtcttaacaacaagagacagcctccagttgggtgggtatcgattaggtctgctgtgctaggaacgagttgcgggaacgagcacagcctggaatcgagatgcaggaaacttaacatctgcacgtcgcgcactatgtgtcggatgcagagtcagaacgctggcggccaaagaagaaagattgccggcgagtacttccctgctggtgcgtctgtccctccctgctcgatgccataaaagtttcatacagaattcgtgaccgggatcgtggcgtgcgccaacccgcccttgcagatctagcaagcggtgtagcagaagctgcttcagtggatgaagcggcactcggagtaacaaggttggattcttctgtcgacgctgctggaagtgatcttctagcccaaccaccgatttcgaggggattgactccactaggcagtctcctagatcgtgcgtgactacgacggcgggcgagactaaggaagcctgaagtatctcttgcggggtcacgtgggtgtgtgatatcttctctggaagaagtttgcgcagagcttgacgaatcggcagctggtgcggcgctagaaattagggattggcgacgagaagcccgagcttcttggagtgactcggtcgtgactgcaccagcgggatcagcatttaactccgtagcggtcgtagctcgattcgaacgtcttgaccttgaagatcgacgccgtggaacttctgagcgtgcatgaactctttccgtgcgctctgtccggtggcgactttgacgagcgctagaggcttctgagcttcttcgcctgtgagagcggctttcagatgccgaagtagaggaacccgccgtttcgttaggaccaggcgtggcaattgatggagctggctcaggaagagcaggggggagtccgagagctgagcgctccgcccgatgcagcttgtcgtaagccacttgagcgcagcgatgaaagaatgaaagtgtggtcttttgcttaggctcgtggttggctactttcctagaacttctcggagtcaaaactatttctatcaaccactccagcattgtctggccgttggatgacctgttcaacggcggagatatacttgagtcgtgtcacttcacgacaagctcgacaagcttcgcctagcatgcactcacgcgctggtcgaacggcaaaaggggcaacaaaagctccgcctcactgcttggttccacccatcggacgaaaatgtattattcggtcacaacggggtcctcaaacagatccagcgagatggggcatgtcagcactgcctcccgttccgcatgactccgtctgctaatgtcctgttgcgttttggctgcgtcgcttgcttgctccaccaactgggctcgctctcggtcgaacgcgcttcgctgctcattcagacggttggccaactcttgatcttcagtcaggtcaataggttctgcgggactctcagcacgtccattgccgcgttcaagcgcctccatcaacctttgcatgtgaggcatagcgtttaccagcgacgagtggatatcgtcgcggctattgtcacgtctcgcaccttgctgcagcaaatgggctcgctcttgctggaactgtgtactttgctcctgcaactgcttcttgagctcctgcaccttggtttcaagacgcaacttatccgcgctggcacgccgctctagctccaatcgctctgtctcggctgcagtttgctggttgcgaatctgttgctggaggctctcgatttgagcttgcagctccgccgccgcctgcagttgctcggcgctactgttgacaagacgctgcagctcgtcagcgcgctgtcgctctgcttttctctcgtcacgcagacgcccctgcactcgctcggcctgttggcagtggcgccggtattcgtcttgcagctcctccatctcctcccagaagcgcttcctcttgctcgcaaagtcttcgcgctgctgctccagtgcgtcctccaagtcgccattttcttcctggagcttgtcgatctgctcctgcagctgctgcaggaacggtctcaagcgctacagcttcttggcccgcacaaggaaacgggagtgagccgatgattgactaaatgtgatgcagtaccgtaactcggactacaaaatactgaacagtgaaggaaatgctacagtaatgcgccaagtacgctggggctgactgaaatgagttgcagttgaatacttatcctgggagaccagcttgctggttcacaaactttaattcgtcacgaatgtattcccagtcacaggtaacgttcaggagacatcgaaatcgcaattagcgatggtacaaaagcttctcaaaaacaaaacacttctttggaagtttttcgctcttcacaagttttaagaaagtaggcagacatttgttcgtttcaatttgactagaatatcatttcgtagttctccagttgcacattaccggccagatgctgcggctgcgaagcaggcgcagtagatggccgtagttatcatcaactaaccgtgcttcttgactcaaattttgtcctaggttagatattgtgctacaaaaccgccatccacaggcgtctcctgcgcctttttcgcagccgcagcatctgcctgcctccgactgctagggttctcgaaagctgcagtatgcgtagttccacaggcagttcaccaactactgcaccgacctctaaagaatatacaacaggttcgatacaaacgcgaattagaagtaaacgcgtcgactttcaaagagttttagattgcggagggctgcatctgaacatctttagtgtaaactatctgtctgtgaacaaccatgcagaactttcacttccacgaaaaaaaaaactaagcttaagtagaaaattggtctcccagccaaagcgcagcaaccttgttgagcatgaaaacggagtattccacttgaatgctacaagctgtcctattacgcttcgacactatgggtaggttgcacctcaatggtatctggaggcatgaagagacgatagttttgtgcgactagctttcagtacaggtctgcgtcggaactcggtagaccgtgcgtggcgaactcaatctggaactcgaggaggggctcgaggagattgacgtcgagcttcgtaatagccatggttgtcgtggccacgaatcgtaatagatgtgcggtgcctcgtagacctttcttggctggcaacaggctggtttgacggcaaactagcagttgaaccacttcgttgggcgagctggataaccccagaatcatcagctctggctccgatttcttggtgctgttctgtccttgggttttgctcaccttccacggcggctggcgaccgaataaactccgtcctgcgcgaagatatcgcgcttctctccgatcccacgagttcttgacggtctcttggcacagtcctagcaattactgcagctccctgaatgtttctcgatgcagcgggcgtctgctcccgcggttgggattgaaacactgccgatcgaggacgaaaaggcgacgagcgtgagtttacccgttcaacgcgttgttcccgtggtcgactttgacggctgctggtggagcttcgactatggtgagagcaagtggcgtcggatataggcagcgctagttcgaccacctcatcggaacttggtgcacggagttccggtagtccgagagctgaccgctccgcgtgatggagctccaccagtgctgccacatcgcggtttggactaaacttcagtcttggcacggacacagtgagtttcttctcggcccttgacgtagacccgccgacgagaacgtcttgccgcaacatttcgtcaccactggatccacgaacaattccagagatatcgggcacgttagcacccgctcccgctgagccaagatgcggaggctaacgtcgtgttgggttcgagcagcgtcgcttgcctgctccagcgcactcctcgttgaatgcactctggtgctcactcggtggcggcgaatcgttttcatcttgggtcagatcaactgttgaggcagctatagcggcttgatcctggtcagtcgtacccgtgtgctgcggagacgcatcagtactccctagctctcgatccacttcttccagtagactacgtaaatgaggcaccgccctcaaaagcgacgattccagtccccgcatatcccgaccacctgcatcagttttttgctgtgtccattgtgcgcgttccagttcaaatgcttcactctgctctttgagctgcttctgcaatctctctacctcctgctgaagctgagcgtgtctcgctctagcctcctctatcagtgcagcggactctctcgcctccacactcagacgttgcggtagattatttaccgggtcggatacaggttgggcctgaatttccggtcaggtttttcaataggggaaattgcattttggtcaggagtttgctaatcagtcaggacttctgaaagtaagaattggcacgccagatctggaagacactactacattgtagatccaattcttccaatgtgctcgtacgtctgctgtttcgtgtcgtgagctgttagctcgggactctccagccacctcccgactcaaggaggtagtcctcgtgctaagctaaacgaagacaaacgactggcggtccttgtggcctacgagtcgctacaatttactggttctcgctgagaacccacgagcaagcaccgatcgacctcctgcctgaccattttggtagttgctatgtaacggagagttagctcctaagttgctttatgctgtaatgcttgctagccgagagcacacttgtactggatgcagtccagcatattgctcatctgcgatcttaaacgttctaaatctagtttttacgaccgttttaattcttactttcagaagtcctgactgattagcaaactcctgaccaaattgcaaattccaagtaattgcaatttccccttttcaatacaactataaagacgtttcctggccacttccagctgctagttggcaagggtgggcgacatcacgggcgaggccgagaagcgcgagcgcgagactcaccaagtgaattcacgcattgccaacacccgccgatcaggcgggggtgtctgcgcgagcgagcgaacgcgagcgctgcaacccgatatatttttttctagacacagcgcctggccgagtcgaggacttcgactaagggggtgaggcaggccgcacagcggcgcccccgtgtcgaagtccgcagacgagagccaacgcgatagtatcctacccaaggtacgttatccctcctgaaatgcccgaccaaaatgccaggtctgacccgtatccaaaccgataaatagatagccgacgttgctccattccctgcgccattttgttcttagagctgctctcgtttgttggcgaaagtgctcaacgctctccttttcttgacttatagtttttgtgtcgcgatgctactgtagtcccggacccgctttcgttgaggcggttgaggataatctccgcgcggtcccataacgattgagaagatggggagtgttcttgcgtaactgaaacttagtgattaatccgttaaagcggacgccatgttcgcttactgacatgtgagttgtggttatgcatttactttggtatacatgaaaacagagcattccgctttttgctagaggctacagcgtcacctaccatcgcctttgggttggccaatactgcaatgcatgcttagtatccggatgtcaagtcgaaactcgaggcggaggttggatcggagcttggccagctagatctggggctcgagtaggtgcttgaggagctcgcggctgagcctgattcgtaggggtaaccacggttgtcgtatgcaacacttgcgggagatgaccggcgccccgcatagatcagccgttcccggccgaaagcaaactgatttggcgccgaactagatgcgggggcagtatgtggggcaacatcatcaaatatgtggtcgataccttattgtgattcttcgcttggaatttggtcatctccttcgacagtccatgatgtaggatgcgtggaaacggtggggaagatgtaacgtcgtagtctttactctcttgaaagcggaatgaaaagtgtatttagcttggcttagttcgggttttccttctttgttgctgctcttttgcagccagtcattctaagagtaaacctagcgtcatcttaacctaaactaaagtaaacacagagtaatccttctaggtgtcatcaacggagttgtactccgttacacgaccccactttaaaaacacgcttaccccttgaccgaagggcagttggaagcgatatgcccaacttgcttgcaacgatgacacgtcgcggtttccatccacttggccgtggttgctggcgtgcttcctccagtgaccccatgatcaaagcgcaacgcgagctcgatggtctcttccagtgtagcggggtgatgttctcggagatggtgggacgtctccgatcgaagcccctgttgaaagtagaaccgcaattccatgggggtgatggccacttggcattggatcaggatatcttgaaaggcgctcaggtagtcgtgcagggagccgatttgcgtgagtttgcggagtttctcgcgcagcatatactcattgtccggtggcagaaaacgtttgcgcatagcacccttgaacgtctcccaggttcggacaatttgggctcgatcacactcggccacaaactgccgataccaattcaaaggcgtgggtgccaggtagcacgacaccatggtgacgaacgcggggctgttctccaccatgatcgggtgatagtcggcgtagtattgttcgatcatgaaaaaccacagctctaggtcctcattgagcgtgccgtgatacttgggcggctccgcctcccgggcagcaggtggtttgctagtgattgcttcaagacgcgcagcttgagcagctatttgcccattcattcgtgcgtgaaattgttcttgttgttgagcaaaaaactgcaacatgtgacggggcacacagcacttcttatcagaggaagcaggagtatacaaactccaagtgaacagccgttcacgtgtccctggtctgaacgggacgacttgacttgaaaagtggtagatctaagactgaatgtatttataggttggtacagatttggcctgcatacaaatcctaagttccctatagtttgtgtaatacaaagtgtatatgttggctctgaggccacttgggtcactatccaggggagtgaccgatgtagccatcccggaatagtgacagggtcactattccatgtaaccccgttacatcctcccccacttagattcgatcttattgaccaatcagagcgaggttacgtcggcgactcacatttcactcgcaaagtcgaaatccatcgacaacgacgcgagctctggcgccttggctcccgggcctcacagagcaactggcgcatcgccgagcaagccgcagggtcttcacgtcgaccggaagcatgcctccaaagcgcagtgcgcgcagtgcgaaagcacctccgaaacgcgggccgtagggccgaagaccagggcggccaaggccaaggacgagtcgtccgcgctgatggaggccacgaaggcggccgaggaggtggtgcgctctcgtagcagcacgccggagagtggccgtcaggccggggctcggagcaagtctcctgacgccgcgcaaggcaaggaggagagtcctcggggccataaaagcccggctcgcgactgggaagccgccgtctttgactgcacgatggtccagtactccggtgagagttcacccgacgacgagaacgtctcgaagggtatcacgcacgctgccgaaggcacggagctggcggcaggcgacataaccaacgcctcggccgacgcaaaggcctcgtcagagaaggaggcggaggacgccgagtctggctcaggcgacagcaagcagtcgcacgacgaagtcgccatggccgacgctggggtcgtggccgagaagtcgccgagcgacgcgggctccaagcccaaggaggtgctggcatccaagcatctgacgctggcacaaggtcgtgagcgtgcccaagcgtcgaaagcggctgccgctgcgaaggccgccgaggccaaggcgaagaagcgttcagcttccaggtcgcctcgcggctccagctccaagctgttcatcgactcggagtctgaggacgaggagggtgccgtccacgagcccaaggagctctccaacaacctcgacgagcagcagcagcaataccaccctgctagctcgggtgtgtatgccaggcagccgactgccacgactgccatcgagtcttcttcaggcggggatgccacgtacccgcagggctacttcccgcccgatcctggcactggtgcgccagcgctgttggagaagctctcggctcctcgtggccttatcggcgggtacacctcgaggggttcctatgagcgtgctcttgttgagaaagagccactctttcttggcgacgttgaagtcgcccggtgtgtgctactagcaccacacaagctcacactgaaggcgttcaccacgcttcgcaagaagccggaggacaagggtggactccatcctgtgtggggtttccactgggtcaagccgaatgacaacatgacctggagcgaggtggaagacctcttctggcgctacgtccagcgcaaagggtattccgaccaagagttcaaagaactccgtgaggatcccactctgtccgcaatcctggacgtgcgcgagctccgcatcgagttcgcccaactcatgagcaagcgcaagctccaatcgaaaatggacgagctgaagcaagaggcgagagccaaagctcgtgaagagcgtgggcgtggtgcgactacgtctgctaccgtgccccgggtatcggccaagaagccaaggactacttacgaagctgcagctgcttctcgtcccatatcgcaacagccttcgggcagtctgcctggagctgctcaacgggctcccacgaggtatccgactcagggtaacccatccacatcacgagcagctggcgcttgccatggagccgccgctcccggacgactcgttccacgtggtagtggatttgcccattacgatcaaggagggccggcggtggcctcgcacggccatggctacgagcctgaggcgacgcagccgtatgctgggccccgagtcaggtggtggccctgcagcaagaggagattcgtcttctccgggaccgtgtgtacgtcctcgagatcgcgcttggcgtcggccttggtggcgaggctgccgctcgtgctggtcagcctggtgccgtgaggattttgcctcgctctatcaagaaactcgcagtctccatggccgtgtggatcgtcgagccgacctgtcgtctttcgactcgctgcgaaaccagctcgctggccttcgggcagagcttcatggccacgcgccgtatccggagcagcagcagccccactcgtatcaggcccagtttggccagggctcgtacggggcccctgcgtatgctactccgatgtacgccgcgccgtcttacgatatcaggcgccttaccgcgactcgacgccgcgcttcgaggagctgcgctcttctccaccgggccacccaccgcttcctgcggggcagccagagccagagggtcatggtacctcttaagacgacccacgtaaaacgtcgggtgagtcgtcatcgacttgggcaagtctatggtgtacgccgcgccatgtcggctgaggaccgtgaagggtccaatgaagcggtgcttcagcttgttgctctcgaccgagctaacagtgtttagcggtaggtttctagtatctaggagaactaaatccccaaccttaaacacgttcatgtttcctcttccatttcggtcagagtactccttctgtttatcttgggcttgcgccatggtgtctcgcaccctgctgattatgttcagcctgtcttcggcaaacgaggacagttgtttccgcaaggtggctggactcacgtccgagacttgggaggaaaaggttttccgagcctctcccccacttaggaccgaagccccggtactgcctcgtaatgggagcggcacctgagggtggcgcaacccgttcaggtaaaagggcgtaaagcccgtcgatgcatgtaccgcattgttgagtgcgaactcaaccatgggcaagcgatcagcccaagagcggggcatctccgcgcagatactgcggagcgtgtgttcgagcacgcgattgacgcgctccgtctggccacccgtctgcgggtggtccgccgtcgacatcgacagtcgtgtgccgagaaggcgaaacagcgtctgccagaacgtagcggtgaaccgcgggtctcgatcagagacaatggtctcgggcagaccgtggtgtcggaagacacagtccatgaacaggcgagcgacctcgtcgccagtgacggtatcacgaactggagcaaagtggaccaccttgctcagacggcacacgaaggcaacaacaccagtgttgccacggtcatcggccggaagtccgaagacaaagtcgagactcatcgacttccagcagtccgctgggaccggcaggctctgcaatggtgccgaggcgtgaccggcaggcttcacgcgctggcacgtctcgcacgtacggacgtaggtggcgacccacttgtacatgtgacgccaccaaaacatctgcgagacagacgcgtacgtcttctcacggccgagatggccactggatggagcgtcgtgcgcctccatcaggatgacgtacttgagatcctcgccgttgggcacgacaatacggggaggatcctcgggctcgaccctatattggagcaaaccgtcagcccactcatagcggtgcagccttgcacgttgtcggggcgtgagccactcggccttggcttccaagccagcggccaagaaccgcacaagaggttcgagactggcatcgtctcggtaccccatacagatccgtcgtgacccgactaatatgagcaagctcgtagtcgggtcggcgcgacagcgcgtcggcaagcacgttcaacttgcccggcttgtactcgacacggaagttgtattccacgaagaatgacagccaacgcgccatccgctgtgagagatgcggcgtgttgacggcagtccgcaaggacgcgtggtctgtataaacgacaaagggcgtcgagcccaggaggtgcactcggaacttgacaagagcgtacttcatggcaagtagctccctttcgtggactggatagttccgttcggctgccttgagctgcctggactggaacgagatgacccgttcgcggccttcatcgtcggcctgcaatagcgcatagccaattgcgtagtcagacgcatcacagactacgctgaaaggcttcgtctcgtccggcaatgccaggactggcgcgcgctgtaagctcgctttgatgtcgttaaaagcatcttgatggcgacgctcctagcgccagtcgacatccttcttcaggagatccgacaagggccgtgccagctcggcgtagcctgcactatacttgtgcaggtagttggcgaggcccaaccactgtcgtaggtccttctgcgaccgaggtggcggccaagccgcgatggttttcaccttctctgggtccgcccggaccccggcgctgctgacgaagcagcccaggaccttgatctcctcagctgcgaacacacacttgtcgatgttggcgtacagcttgttcgcccgcatgacttcgaacacacgtcgaaggtgctggagatgcacctccatggccgtctggcatgcctcggcacggctgtggacgaagatgtcgtcaaagtacgtctgtgtgaacgcacgcaaaggtcggaacagttgtgtgactaagcgattgaacgttgcctgggcgttagaaagcccctgtggcatgaccagccactcccagagcataccgctcggcgtgctcacagccgtgagtgggatgtcactctcgcgcatcaagatctggtagtatccgtccaccaggtccagcgcgctatacagcatgcagccggccatgttgttgagcaacacgtccttgcgcgggatcggtgtctgcgcaggcactgtcgcgctgttcagcttgttataagcatgaaccagacgccactttccgttcggtttgcgaacacagaaggtaggcgtcgagtgcggggacttcgactcccgcaccatgcctgcctccgccttggcggcaaagaaggcatcaatgacttcacactgctcccggggaagaggccattgcctcgtgacgtagtacttcgtgcccggcacgatatcgatctcgtgcctgattcccctgtccggagggagattggacggtggatccttggacaccacgtcctcaaactccttcaccaaggggtacaccgggtcccgggggttcttaagaatctcagagcccatgcgcgacgcgcgctgtctctggaactcctccaggactgcctggtccatgaccgaggacgagttcaactcggccgacgtggactccggtcggaggagaaccaactctgcgatctcccccgccattagctcggccaagaagtcctccatggcgagctccccaaggttcagcaactctgaaacctcgggcagagctgtaagctcgacagctcctgtcttgacccgactaccggtcacgccgtcgaagatgtgataacactcttcggcggctggagccttggctggaggctcggagtcgctggcgactggcgtcatcggccacacgactaggcccggcttacgacgtgaccctcgggtgtcttcgtctcgtggcgccgccttgacggcaccaccgatcttctcgatctcgtgcggaactacgttacccgccttgtccttgagcggaacttggttacccgccttgttcttgagcggaacttggttacccgccttgctgggtggaactatgttacccacaccaggagcgcttccagcgactcccgcatcagttatggtctgagtgacctcctgtggaactatgttacccacatcggaagcgcctgcagtgccttcctcatcagttacggtctgagtgacctcgcgtggaacttggttacccacgccaacgccagcggcgccttctccagcagcccttgctgcctgcggtacttcgttacccgcgtgtggacctacgttacccacctggtaggtgctgtccggcacctccactctcaggccttgtccggcccggtcggagtcgtcgtcagtctcgacggaccccaagaactcattagacgctgctgcgccctggcggccctcgtgggtgccccagctgctgccagaggtgggaacatgactcaccaaagctctttcagagcgtgggggacggctggccccgatggccttgccgcgccagtcgatccaaggctcgtgtttctccagccacggcatgccaaggatcaagtcgtacttgtccatgtctaggaccaagaacggctccgtgctgtcgaagtcctcgaacttgacagtgaggtccatgtggacccgaggtacttctaccaccgtaccgtcggccagtcttaccgagaccagcccgttgcctttgctgcctcgtagcgcatcggcacttgtcgcgattgcgggcgacagtctggcggcgcgcaaagttcttggacgccccagagtcgatcaagattctcaagggatgatcgtatcccggtacactcgcgtgcaccacaagcagcccaccgctgcccttctccgcttcgagagtacagagactctcaggggctaagtccccatggcgtgcgccacccgcacgcccctcatgaagacttagtgtttccccagtagggcgccccgcccctactggtgtccggcgttcccctggttcctggggcgcggcttctgccagcgacccctagagccaaagggcttcgaagagaacttcttcttcagtcctcccgcgagacaagcacgtttcatgtgcccaagcttgccacagccgtagcagcgaatgtcgctctgctcggccatgcccagatccatgggaaccggcccgttgatcgcttcattgccggagttaccattaggcgcaccgccagaggcagggttgctctgccataccgtggcgggggtacgagcctgcttgtggctgtactcctcctggagggcgatctgaatcgcctcctccatagtgtttgcttgcacacggaacagttgcgtgcaggcaggaccgacacgcagaccgtccatgaacacggtcaccttgatgtgttcaggcagggggttccccaccaaagaggcagtgaacactcgcatctcctggatgtactcatgcagctcgcgccttccttgtttgcaggcgaggaagcgcgaacgctggcggtactcgtagttcgccggaagaaacgcggcccgcagctgctcgcacagctgggaccatgatgcgaagcatccacgcgtcgtcgcttcgcgcgtatacgcctaactcttagtgcgaccactagggttggagagcgcaaaggcgacacggagtcgctcgtccgagacgagagccgcgtccatcgcgagctcaacatctcgaacccagaagtgaaggttttctccttccttcccttcgaaggggtgaaccttcagccgcaggggcttcggttgcaccggcttcggcgcggccgcagtggcctgcagcccttgaacgtgggcgatgagccctcgctcgtaggtgtcgaacgcgttgatacgctcaacctgctcagccggcgtcgccgccgctaagctacgcagggcatctgtcccaaagttgcctgccatcttacgaacggactcgtactgcgagtcgttcagatggggaaactccgtacgatccatcttggctcactcgatgagaccacagaggattcaggtagtccaatctacccgcgtaggcgtacacttcttaacagaggaagcaggagtatacaaactccaagtgaacagccgttcacgtgtccctggtctgaaggggacgacttgacttgaaaagcggtagatctaagactgaatgtatttataggttggtacagatttggcctgcatacaaatcctaagttccctatagtttgtgtcatacaaaatgtatctgttggctctgaggctacttgggtcactatccaggggagtgaccgatgtagccatcccggaatagtgacagggtcactattccatgtaaccccgttacacaacatctcactaaacgtttgtggcgcgttgctggcgtccatattggtgcggctcgatggctacacttgggtcggctcgatggcttcgtgactcgatggtctgaactcggactcgatggtctgaaacttggactcggtagctcgatggcgccgaggacttgacaacgacaagtgctactatgtaacgtcgtaggctttactctcttgaaagcggaatgaaaagtgtatttagcttggcttagttcgggttttccttctttgttgctgctcttttgcagccagtcattctaagagtaaacctagcgtcatcttaacctgaactaaagtaaacacagagtaatccttctaggtgtcatcaacggagttgtactccgttacagaagacgactctcaccgtacggtgacgcggtaggggatacgcccagcgcgttcctccactccctgaccccggaagttcttgatgacttctccacgcatgcgccagtgtactgttagtggcattagcacctgcagccgtgcttcttggcacagcatgtggcggcgggggtccaacaattgccacaatcgtacccgttcgaggtggtaggcgatgaaaacacccgaacgtgaatgcacccgttcactgcgctgatctcggtgtcggcttcggcaatgataagggcgaccggcgtcgaccgtatagggtcgttgctctaccgcttcatcggttcttgatggtgggagctccgatagtccaaggatcgaacgctctgcgcgatggagctccaccagtgtttccacgtcactgttcggataaaacgacactcgtgatgaagacagaacggacacagcgagcttctcaacagctttcgacgtagtgcctccgacgagaatgtcttgccacagcacattgtcaccacaggatccacgaacaactccagagatattgggcacgtcagcaccccctcccgctgtgccaagttgtggaggctaatgtcacgttgggtcctggcagcgtcgcttgcctgctccagcatctgtgcgcgctcctcgctgattgaactctgttgctctggagcgtcatcttcagcctgggtgagatcaaccgtcgcagtagccagagcctccgaaaatagcattgtcaataacattatttcagaaaataacaataaattacgcatttcggcgggttcagccatctaccgtgataatttattgatgtgctttgtgatattacataatttatgacagttacctttatataataatgttagcgttttaccagccatcttctcgcttccagtcgttcagaagaactggaatcaatggttgtctgcgttgctagttgcagctcatttggcagcgctcacttttcaattttcacttctcaagcctccaagacctcatccagcatggttcgcgctaaacgcccccctcgccctacctacgcgaactcccaagtctcggggttttacttccgcccgtgtcgcgacgagaacgacgaggtgattctcgagtatttccgttgccgttgcggcacggttcggaagcaaacccataggaacgggtactccaacctgatgaaaaatatcaggcgggagcaccctgactacgagaccgtcatgctcgacgctacgacggcggagacaggctccctcgtgaacttcgtccgccactcggcgcgcaacctccacggctggatggtttggattgtcatgtgcaacctgccactctctttttgtgagagccgagaagctcggcggtacgtgtatgcataaggtcattgtgtttacattactacggaaactaacaactttactttgtggatgttattcagctactccagcctggaccccatctcggaggaaacgctgcgggctggcatggacggggtcgttgtcgccgttgagcgttcgattgcgtcggagctcccagcacgcttcggcatcatgctcgacggctggacacacgcatctgagcactacatcgccgtgttcgtgtgctatgaggtgaacggctgtcccaagacaacgctactcagcatggccccgctgctggacgcgctggacgacgatctctcagcgcagggccatctcgaatttctagcgaccatgctgccgcgcgattccggcgtacagctggcgcagtgtcgcttcctcgtagctgacaactgcgccgtaaaccggcggctggcaactcttatgagtgtgccgcttgttggttgcgcaagccaccgcctgaaccttgctgttcaggcggacatggcgtcgcatgaggaggacctggctgctgtgcaggcgctcatggctaaattgcgtactctcaccaaatctgccaaactacggtaagcgccaatgtgtatgtgtggtgtgtcaatatgtttctaacacaatttgtgtacttttgtaatttttttacaaaataggttgaaaacgccacttcggcctgtcattcgccaggacacgcgctggagctctacgttcgagatggtacggcgctacctccagctcctcgagtttcttgacgccgaagacgacgacctcatggacctgctgccgccgccggcgatgaacaagcgactgcgggcattgtaccaggagctgtgcgacatcgagtcggctcgaaggcccttcaaggccacgacgtcgacctgctggacgttcgcgagtggttcgacgagctgatcgctgtcaagccacaatatgcgcgctacattggtaagtttgtaactgttgaatttgtgtttaatattttcactaacaattgtataatggtttttactttgcagggcctcgggccaacattgtgcacaacccagattttgaggctgggtgtgtacgcgttctccgcgggaaggcgcagcggctgacgcgtgctgaaaaggccgctttgcagcccttcgaagctgccagaccggacgacgcggccacgagtgaagaggaggaggatccagccgcgtcgttcgtggagcgtcttcggaagcgccggcggcttgcacaggaccgtgtcaagtatgagcagctgaagagcatcccacccacgtcgaacgtggtggaacgcttcttcagcattgctcgggtgacgtttggtcatcaacgacacggctgctgccacgcacgcttgagacgatttgtttctccgccagaatcggtcgtactgggatgcaacgactgtggacaatttgagctagatgataagctaactggtgtcttgttaatagacttcatgcttttcataatggcattatttattgtggtacgttcggggcaatgccataatgtactgttgtattggtaggaataatttattcagcaacgcccaacctactaaataaaaatgccatatccggaggccctggcagcagcaatagcggcttggttctgctcagtcgtgccgccctcctgcgggcgcacttctgtagccccaagctctcgatccacagcttccagtagtgtactgcgcgaatcgggcatcgctctcaaatgcgacgcttccaatcctcgaccacctgcatcagttctttgctgtgtccaccgctctcgctcttgttcatgaagctgctcacgcaaaaactgcacctcgcgctgaagtcgctcttttatctcttgtaaagttctagcatcagcaccctctccaatcagggcattgatgggttgtgtgaagcccatccgctgctgctgctgcagtgcggcgggctccctcgcctcctcactcaaaggttggtccagtccctgcacgactacttcgttcttgctttcaaaagccatcccacttcacgcttgttctgcagcttgtgctcgtcttctcacgacttagagtttattgtctcgtggtgccgcctgtacttcgtaaaattgcttgggggcggcctcaagttttcagctgagtcgtgagaagtcgcgcgatcccgagaagatggaaagctattctgactgctacttccacaaaatggcgtaattgaacagaacaccaagtattgccgaaaaaattcaacaatcttttctttaaattaaccaggggtattgtaatcacttaagtctaacgactgctaagccgcatctccctgttttcctcttgaggtggcccccacacttcatcctgacatctatagcttcaaaatgtattaactccaagtgtagtccgtatccaagtcaaagccaccgtccgagttatcatccaagactcgctggactcgaagcggatcgcctagaacagagatccattgtgattgcagttctatttcgcgccatgaacgcctaaaagcttgaaatgatagcctcttgcgagatcattagtacgggcccgagtcggaactcgaggcagagcttgagtcggagcttgacgagctcgatctggagcttgaccaggaactcgagctcgaagtcgaggttgagtcgtagtaaccacggctgtcgtgatcgcgccttgtagtcaatgcgcggtgcctagccccgcccgcccgttcttggccgccatcgggctcgctcgacgacaagctaggtgggaaatcattttgtggagcgagctggataacgtttccaagcgcagcattattacctcgggcatatcggatatgttgctgcggttctgctcttcgactttgaccacctcctatggcagtcggtgatccagcaagttggaaaaaggaggccaaggagataaaccccactctgcgcaaagctccactcagtggtcctgccggtaggatatcttcatggtttcttggcgcagcccttggtgtaagaattctgggttctgcaacatcagcactcgcagtcggagcaattggagcagcactcccaacatttctcgatgcagtaggcgtctgctgctcaccagtctcgataagtcggggccgaataaacaacgaacgtaagtgcacccgctcactgcgttgatctcgatgtcgactttgacgggtgctagtggagcttcgactatggtagagcaagtcgcgtcggatataggcggcccacgctctactgcttcgtcgttgcttggtgcagggagttcaggtagtccgagaactgaacgctccgcgcgatggagctccaccagtgtcgccacgtcacggttcggataaaacgacaccgtgggtgcacgacagaacggacacagcgagcttctcatcagcgcttggcgtagtgcctccgacgagaacgtctttccgcaacatttcttcaccactggatccacgaacaattccagagatatcggacacgtcagcatcccctcccgttgtgctaagttgcggatgctaacgtcctgttgggtcctggcagcgtcgcttgcctgctccagcaactgtgcgcgctcctcatcgaacgcactttgctgctgctctctcggtggtggactgtcatcttcagcttgggtgagatcgactgtcgcggcatctatagcggcttgtgcctggtcggtcgtaccagaattctgcgttcttaaacttgaacccccaagctctcgatcaacttcttccagtaaaccgcgcaaatgaggcaacgccctcaaaagcgacgattccagtcctcgcatatcccgaccacctgcatcagttctttgctgtccattgtgcgcgttccagttcaaatgcttcactctgctctttgagctgcttctgcaatctctctacctcctgctgaagctgagcgtgtctcgctctagcctcagtgtccttttcaatcagtgtgtgaagctgctgctgcagtgctgcggactctctcgcctgcacgctcagacgttgctccagtccctgcaccatttcgatcttgcgttctagagccgttcacctcgttctatttcgttccagagctgctctcgcttgctggcgaaagcacagcgctcgtcctgcagcttgtgctggatgatctccttcgctgcacttaaagtaattgtctcgtggtgcttgtctttgatctgctgctccagaacttcgatgcgccgcttgaggataatcgccaggtccaccagagctgacttggactcttccgctagctcccgagcgctttgaacctcggaagtcgacgagaggaagctatccatctctaacgattgaaaacttctcaagatggaagctgttatgagtgttgattggctgtgtaattgaaaattagtgattaccaaacaacttcaactgcaacaaatctttacatgttagtccgtatccgagtcaaagccaccgtccgagttatcatccgacactcgttggactcgaagcggctcacctaaagtcgagaggtccattggggtcgcaatttcagtccgcgccgctaaggtatccatcaagttccacgattcatccgtcaacactgggaactcctccacggttcgaagcggagacggcacgtgttcgatttgagtttgctccggtccttggtcactgtacaccgcagcaagatatccatcttcagtcggtgcagcagagacgtacaagtcaccacttgcgggtggagtgtagggtgactctgccattgaaacagcacttgctgtcgctctggcgatagtgggccagcttcttcgctcataacttggagaaagccttcgagctcgaaatgtagaggaagctatcgtctcgggagattggtcacttggtgctgatgaccggcggtgaggaacctcagaccgtgcgcgaactcgttcttggcgaagctctcggtattgacgcaaaatttggtgtagacgcgcggctccaattctgatcgattcttcacgaggattgcctggtgaactttgcggctctagcattgaccgttccacccggtctgctctcttagctgcgtctgcaattgttccaccgtcctttcaagctcttcttcgcgctctctaacctccctgtctgcctcctgcatcctgactgcaaggtcttgccgtgtccgcagctgctcacgaagctgctgcctcaagcgctcgacccactccttctccttctcagcaagaacactcgccaggcactttatagtggcatctttgctcgcaaactccgcgcttagcttgaaattctcactcgtgagctgctctcgctccatggcggaagtgctaagctgaaatgtgattggctggctagtgcaaataattgattatcgggtgcacatctgaaacttcaactcggatgttgccttttcagtcggaatctgagatggactcgaagtccgagcccaggaggtcttccagtgacgtgacgctccgcgcaagagcgcttagcgattggcgaggagcaggctggctcgctgtcaaccggggagactcgtgcttcacgcgcccaagcaccgagtcgtcttgtgtggcagaaatccgaactggtcgacgtgacgcggctgcagttcttgatgttgtacttctagcagaagtcgaagcagtcggtctcgcacttggtcctgacaggcgggctgtagttgatgttgctgccgctgtagatggatgatcacgggctgatgccttcatccacgcgtctagggaggtggatggatccttggcattgcttgatgtgtcgcttgtgcctgccggttgactacttgctgaaccattggctgcaggactaatgaatgaatgccgagcagcactggatgcagctatcggcaaggtagataaccgctcccccgtggataccgcacttggcggctctgctgctatcggggcagcacttggagtagcatttggacttgaacgtgaagtacgccttctgcttgaagatgcattcgtgtttggcgtcgcacttgatactgtgcttgatgtcgcagttgccgaagcagcattagagcttaaagctcgacgtcgagaggtagaagatgactgtacttgctgctctgcaacagtggtgaccaatgaaggggccatcgaagctgcagaagttctggacctggagcgttgacggctggtagcggtagaccgattgacgctagaccttgaacgttgacgactactggtagtagagcgggactgcgcgcttggaagacgaagtgaactgaggactgaacgcaccatattccttggtacagcaactggcccatcgctgcctagtcgataaatttcaagacctgaaggttccgcttcgcgattgttgtcggtagcagcggccgacacagcggtgtttggtgaaagattcgaagtagcaacggatgccgtcgtacccgatggagcgttgccttgggtattaaatagtgatgattggcggtgaggtacctcagatcgtgcttggactctttcgcgccgatgctgtctgtgctggctttggcgtgcgcttgatgctccaattcttcgtcgattacggcgggtgcttcccgtcgtagcagatatcaccgcgtattcatccagcgatgatgcagtggttgttggggtcgaatcttcgccggttgacatatcaaaaagggagcggttccgttggtgcagctccacaagcttcgtcatgtcgcggtttgcgtgggtcgataccagttgccctcggcaaaatgggcagagaggactttggctcaaatgcctctgaggaaaatgtcttgccgcagcatccagttagcaccgggtattcaaagagttcgagcgagatcggacatgtcaacagcccctcgcgctccatcaggctctgtcgaatggcatctcgttgggttttggctgcgtcgcttgcttgctcgagtagctgcgctcgctcttggtcaaacgcctcttcctgctctttcagacgctgcagcatatccttgtctgctgccccagctcgtccaagttttgtgttacctgcagctggtttagctttacctttgcctttgccttgctggttgccttgcaatcgatcgtacgcactcaacagactccgcaactgtggcatggcgtcgtcaagagatagattcagcttttcctgcgcgtcgtcctggcaactgctcgctttctgcatcatctgcgcgtcacttcgatacttcgccacttcctgcgtcaactgcacccgttcttcctcgaatgccttactctgcacttcgagacgttgttccagctgcgccactttctcttgaagccgcgccttcttcgcagtagccttgctgtttttctcattaaacctcttcgtagcttgcctcgccttctgatcgtgcactaattgctgcagagacgcaatctccgcgtctttcgttttcagacgccgttcaagctgctccactgtctgttgaagccgcatgtgtgcctcggtagacactttctctatggtcgcttgcgagaggctctccttctgctcacggagctctctctgcagcgagccaatctcctctctaagaacagcctccaggcgtcggtactcggcgtgtcggtcctccgcttcccgcagttccctcttcttctccttcatctcgtcccggaaatcctggattgtttcccagagctgctctcgcttctcgtgcagcgaggcctctagcttgtccaccttctccgcgagctgcgtcttctccctctgcagcgcttcgttctgctccgccagctcgccgttggtctcttcgaggtcgtcattctgctgctcgaggtctcggatgcgctcgttcagactggcgccgagttcagtcagcgccgccttcgactcctccgccagcttcaggaacagcgtcttgtgccgctcgcactcctgcgtcggcgcgaggcagggaccgcaagtccccatggcacacaccgctggacgtcaatgcgagtgtaggtcaaaagttgccattgagataatcgtcgctgattggttggtcaaaagttgccattgagataatcgtcgctgattggttgaaaatacgcgactcacggtcaagtttaagttgaagcgtgtgtagatctgtcgtgctcaacctgattgagcacttggtcttcatcgagagtacgatctgacgcattcgcattggatcgcgctgtgcattgtcgactggcggtgatctttattgttatgcgtgctaacaaggcaatgtctacgacggtgatgcatctcatttgataatttgcttaaaaaaatgacgtcgttgttttgaagcgccttcggggtaagcattttggcaatgccggctcaaatcaaggtcgtgcgtgcacttcgaagtattactattatgttattgtcgaaagaaagtgttttcaggatatccaaggtaactgtgttgatgctttccagtgaagacacctgaaattctcgttgtcatcgatgcatcgagattcgtgcgcagttcgccgtcagcgacatcaagtgacatcagctggcgaggtagccaccccttcgaaggccaagcgctctgagcgatgaagctctactagtctagcaatgtcgcggttctcgtgaaccccgactccacgagcttggcaaaacggacacgccaagctctgctcgaatgcctgtcgtagcgggccccacgaacacgttcttccacagcaccctgtaatgactgggtccgcaaacaactcacgtaaaagcggacacgacagctccttttcgcgcgccatcagggcctgccaggccatcttctgctgggcttgcgcctcacggcttgcctctctaataacctcgtaagcttgtacttggccttcgggtggtgacggccagtgcaggacaggcactggtgtggttggtcgaattgccttcttggccttggtcataagtcgccaatagactgcgcaaatggggcacgattcttgtgaaacataagctgctcgccgcttgaatagtagccacttttgttgcgccaattcgccgcagcaactgtgctcgctcgcgattaagcacagcgagttgaacttgcgttcgctttgtaagctgcactatggtcattttgagctcatcttgcgccgtgtgcgccttggcctcagcttctgcaatggctgcctgctgggcggcattctcctgttgtaatctctggatatccgctgttagcgcaccagcactagtcgcttgttgcagatcattcactcgttgccgctcagcttcgcactcgatatgcgtctcgtccaagttagtctccttcgtcatgaatgaagcgcacttctgtagcctgcttgtcggtcgcaattctctcgaatgattcgcaaacgctgattggttcgatctttaaacaacagactacaggcggaggacggattgtccacaagaccaacctcaaatgtccacaagtatctaatacccttaatcctattgttgtaggttaccaactacctacttcaaagtctatgcacactcgggaaaacgccactcttcagcagctcgccgctttcgaggtcttgaaaactcgtgggcccaagctgttagcgatgcagtggtgggtcctgatgagactggagatcgaaagctacttcccgatgcagcgtcaggatctttgcgatgagattttcctggcgtctctagcgtcacacgtaaagcggcacttggctcaaacaaatagcggcacgttcggcgtgcatctatacttgccggaggccgtgacagtgtactcggagaaatgttcggtgcatcactttccccagtagttggcgacgctgttcgagcattcgaaccccattgcgaagtatcttcttcccgggagtctccaccagcgtcgtcgtcgatatcctttgcacttgatgcagcactgggcaggcgataaatgccagttgactcatcccgctcactcggacgctcttgaagcagtactgcgtcaactcgttgactggggcgagagcatgcaacggttagatgagctgcggtacgcgcggtgataaacgcaatatcactcaaagctgagcgttcagagcgatggagctccactagcgtttccatgtcagcatttctgtggacatagccctcttttgcattgcaaaacggacacacagagatctgcgcgagtgcttgtctgagcggctcccacgaagccgttttcccacaacattcagtgaccaccgcatcttggaacagatcttgcgaaagcgggcacgttagcaccttttcgcgctccatcatgtcgtgccacctcgtttcttggtgggcgttgagagcctctccagcttcctttagcagctgggtcagaccttgcttcgaagcttctccaacatactcatccgtatggatgcatccatttggaacaataccatggtgccttgaatccacgtaaccaccttgctgttctcggtcatcccgtgatccgcacagttgcggtatgatcttggtcagagtgacagccacatcctcttctcggctgaacaagctgtggcccaactctttcttttgatactgatcccctgtatcttcaggcgtatcaaaatctccccagccaggtttgtcactgcaagaaatgtcgatcctaggctcacactccgtgtgctgatgacgagctgctgctctcagtgccgactccatcaaacttcggtccgcttcgtcatcctccagctgctgcaacttgccggtgcggtctttttctgcatctagcgcgtcaatagtctcgctcagctgccgctgcagccgccggatgccctcgtccttgagtcggagcgcgttctgcgcctcttggatcttgcgctggagtttcctcctctttcgcgcggcctcgcggtgctgcgcatccagctgctgctcgaggctcttgttccgctgcaccacgtctcggatctgctggtcgagggtcaggttgcgctgccgcaggagctccacgagcgccagcgaggaggcctcttccggcatcttgagaagctccggctgggtcttgggtacattgtgttccgtacacgaccggtacgttcatttctaacgaattagaaaaatctgtcaaacatgtgtaaaaacgtttctaaatgaatgaatttgaatttggcgccaaagcgattttacgcgcgtcaattttgaaccggtctcagtcagtcccaattccaccgccgcacacggaatatcccaccaggagctaccggtactgcaactcatagagctcgtgtcaagcccgtcaagtcaagccgcaccatccccctggactctgcaccgctcgacgttcaactttttcgccacccagccagccccagtcatggcgacgcaggagatgatgagccccatgcgccgcagggcgcaggagctgccgccgcgtacgcccggcagcatccgcgtggcgggggcctccagcatccagccgagccccaaccggacggaggcggcggcagccatgatgcatctgctcacgggcagcaacggcgacgagcaggagcccaagacgtgccccgccctcaagccagcgaaggccaagcggcgatacgtgcgcaaagcccccaagaaggtcggcacctcggccaagcggcagattaagacggcgtggatggactcggacgcggcggcagcaacggggaagccctcgtgcaagacggactcgaagccggaggacggcgacaaggacgccaagaacggcgactggaggatggacggcgacgaggtcaggttcttccccttccgagaatacaaccggaaggacaagtcgctcgggctgctgtgtgagaagtacgtgctgtggtctggggtgtagactttgtgtggttaaagggttgctgatggtgttttgttttgttatgtagcttcctgaagctgtaccgcgacgacaagattgccgagatctgtctcgatcgagcagcgacggagttgggtgttgagaggaggcggatttacgacattgtcaacatcctggagagcattcatctcgtgagccgcaagagcaagaacctgtacaattggcacgggctggcgtcgctccctacgtctatcggtgccatgaaggtaagaccgcaactgaaatggctgcgatgtgggttgaatggaggcttattttttcttgttgtctagcaacgctatgctgaaatgcacaagtcgtcccccggtggctccaagagcgcagaattccctcccatcaagagtacgtagagcccgaaaattgtgttttgacctttgaagccaaactgacatgacacgctctctctaggtgatcgtcggagagggaagtcactgtcaaagctgagtcagatgttcgtccagctcttcctcgggaaggtataccacgactcaacaacggtcttgtaggtagattgacagctaactaacttctgcacctaaattacacaggaggactgcattatcccactggaccaagctgccaagcagctcatccagatggaagatagcgaaaacgaagaagaccgccttctgaagagtacgttgtggaagttgctgcttatctacggttttcacgatttcttaccatactctttgctccgacaacagccaaaatccgccgactgtacgacgttgccaatgttttggtaagcgtcgggctgatcgagaagctccaactctccaactcccggaagccggtctttcggtggaagacgcgcagctcgacatcgacccccacctcttctcagacaagtaactcgacaaaccaggagaatgtgcgcgataacaagccgactcagcctggtccggacaacgcggttcgagtaaagtcggaaacaatgcctcctgctgccgacacggaggatgcggacgtcatgaaatccccccagtcgtgcgacagcgatatgttcgacgacggcagtgactcccagtccgactcaagcagctgcggctcgaagcgaaagcagagcgaccaagacgcaagcgacgtgagcatgtcagaaggtgagtcttcctcaaaacggagtcgacttaatgagaagggatcgaagcaaccgacggaggagaagaaaatgctgcttcgaatggacgccaacaacgagcctattcacccgcagactatcctcctcgagcagcaagagcagctcaaacagtacatgcagcagtacatccgcgaatacgtcgactacttggcagcgcaccagcaactcgatggagtcaagaccactggtggtctaacgactccctccaagcccaacggatcaagagatacccacggtaccccggtcactctaccttctttggctgggagtatccaagatctgctgctgtccgagagccctcagtccgtagccgacatcgtggcagctcgagtcctgaacaacccgcggccgcctcttggaacgccgccggttgccgctgagccggaagcagaagcagctccaaggccgttgatcctctcgaagaagcactttggctctatcgtcaagaccccgccgccgactaagggcaagacatcacatgcaaactccaaagacgacgaagagcagtacgacgctccacggaatctcatcatggctctgcaaccgcggtcgcagtcctaggaatatttaagcgctgcgtgtagcagacgaaatcgctggtagtgacgaggtgggacagagcggctagctgcgtgtgtgtgttgtgaaatgtatttcaagatgaatgtatctcctataactcgtagcatacagtacttggaccttgtgaatggtgagtcaagcgctctgatggtccgcccagcgctgactaatcgtggcataagcggctatgcaagtgcacacaacatcctatcccgtctgttgtcacgcagcccctgatgtcattcccccaaaaactctcgcgtcaacctgactcggccggatcaaacccatgcggaagcccagccagcgcaattcaacttgagaccgcgagaaggcagagctggcggcgcttcggagcctcgtggtcgagctggaagcccacttggcctcactctctcgaggcgacggaacgctctctcggtctcagctccaagtcggcgtggaaatgcttcgctgagcggcaagcgcgagctcgacgaacagcagagcagaccaaccgtgttcttaatgagcgtgcccagagcaacgccgactggatccagcgtctgtgggagctgctgcacgaatagcggggagctgccaacgcctacagtttcaaggtgatggcgacgatgcagcggagagctgccaacgcctacagtttcaaggtgatggcgacgatgcagcggagagcggaggacgggtttcattttaagggttaaacgggtcttttgcgggtctggtaaggtagttggtctggtgtgcatatttggctggtcagtatgaccgtcagcctgatccgtacaatacctgtaagataccgtgaacgtggtagcaaggcatgtgtatcatgctttaagggggcggacactcgctcgttggctctcgtctgcggacttctagacggggggggggggggggggcgccgctgcgcggcctgccccaccccctcactcgaagtcctcgactcggccaggcgcggtgtctagaaaaaaaatatcgggttgcagcgctcgccttcgctcgctcgcacagacacgcccccgcctgttcggcgggtgttggtgaacagtgaacgcattgagtgagcctcgcgctcgcattcgctcgccctcgtccatgaattgataccagtacttgcgtaggctagtttatctactgctagatcgatatgtattagtaacacctaggtcgctaagtggtatttctcaggtatggatatgggtcgggcatgaaaattttttatttttcctgtaaaatatccataggtctggatagggtcttactgacccgaagccttaccagacccgcaaaagacctgtttaataatcttcccggaggacgacctcgtgttgagccaattgaaggggcaagcacatgcttccgcgctgcgattgcccgaagttttcgcgagaaatggcgtccgagcgctagaagacctgacgtcggaggtgtgggctcacagagagactggtgcaatggaagccgcattggtcggtgtgcgccacgttccctttgatatgcactcaacctcaaacgccctctggacggctctctcgcgtccagaagcgagtttcgcctcggagaactgctccgtatcggacgcgcgcgacatcgcactgaaggctcgagtagtcgaacgcgcaccgagcctctgcaccatgaaggtgcaagacagactggtactcaacgacgagactgcggtagtcgactatcacgcggtggttcatcgaagcacgctggaaacacctaccgcgccaatatattcgtgtggcaggcgattctaatgctggcggacggcagcgtcaggtatgaggacacgacgtgggccgcggttcttcgctctccgtccagcagcatggaatcgatcgtcgcgctcgtctgtcaatcggagctcaagacgaaggccggatacagcaatgtagctgacctgaaaagcctagcaatggcagcggctcgagaatgccttgacattaccctctctaccactgaagacatgttgcttagcgagagcctgagcgaatcatcgcataagttgccaagctgtatcacacagcttcatactttgatgtgtattggtttgtaaagtttagtgcagttcgtacgaaagcaaaactacggacaagcgtctccctaccaccttgcttacacgatagccttcgggtcttgcttgaccgccgccagcagctcgcgcgccgtacggaagtggacattcgggaagaattcggcgcggtcacgcttcaccttctcctggtcgagcttgagcgcccccagcggcacatacagattgaactccgccacgagggcggcctcgctgaggtctttggtcggccaccttttgcagctcgtcgagcgactggaaggtgaccttgagatcgtcgacaccttcggttttcaccaactccgccatttttgccacgtcgtctgctcttcctggacgaaggtgtggtggcgccacttgttggggcttttcacctgcgcggcgacagccttcgcaacgtcacgggcgcttgtcgtctcgaacggttcgttgccggtgcccgggatcgtcatggtctttgtgttcaggtccaaggcgtagaacgggcccatgcccgggtggtagcggttggtactcgggacgatgtagtccatgacgaatccgatcaccacgacagtccactcgagttcgctttgctccttgagcgcatcgcgcacgggcatgttgaactggtacgccgtgcccggttcttcggtgaactcctccgtgttgccgccgaactcggatgggatgaagcgcttccacttgggcgtctgcttgcaggcctcgatcagcgccttgtgaacgtccacgtaggccggagacatgtcggagatcgtgctgacaagcgcatcgcagtcgctccacgagctgctgcacggacgagtagtcggtgatgcgctgctccacgacgcccttcttgccgtcgaagaagtccttgtgcgaccgggtcaagaggacgacttcatgtccagcagcgggcagctcttcgacgaagtacttggcgaatgatctggctccggcgatggctacgcccatggtgatagaaggggtgggggtggatgagatgttggctcgagatcgacgattaaagaatgagagagcggtggggttcatatgagcgagatacctgtatgattcaagcaaggcaaggtctgctagcgcgctgactaatccctcttggattgtcagatcccttggatcagtcagattagttcacttcaactgcagttctgactcaacagttctagggcattgctggtatctatacaatctctctctcgatacacatatcgaccgaagatatgtatttcaaggagtcctaggagcgtgcaatacatgtactcgacaatgacggacgagaacaaaaaggtaagcgtggtttccaccccttcctcttttcaaagcaccgtggcgtgttcattactttctgttagcactgtttgcgcgaagacttactttgtcgctggtactttacttggcaatgcgtgccgagcagcgtaccaacactttttcattccagcatgtcttcagcagagaactaaaggaaacggcgctgatcgacaccggcacttagaagtacatgcaaagatcaaacctatatgcacactgtaagctgcgttgcagttattgacggtttggcaagcactccccacttggtgagaggactggtgagagaggactgcagaccctcatcagcaagttgaagctgttcagataccgtaccgttatcgcttctactaagtgcgatgcttacgcccagcatagcatggcgggccacattccaacgttgcgccagtatgcgcacggaagcggacgcgtcggctgcgcgtatcaagaagaagaagcgctcgtccgagcggtcgaagcgccacgacaggcccgcggagaaggacgcaacagcaggaggagaatggaagcagttcacgtcgcccgacggccacccgtactactacaacgccgtgaccaaggagagcaggtgggagctccccacggagacggaggagcagccccccgctcactccaagcaccgacgctccaaagggagcaacaagcagatcgtcctggagcaagaggcgcctcataccgaagctcctgctgataataaacccaagaaggagaagaagaagcggccggagagtcgaagaagtgccacggacgaggtcccagctgtccgcaagtccaagaacgccatgttccagaagctacaagcctcgctggagggccgactcaatgtacccatgatggggcgacccccaccgatgctgaacatccgacaggagggcgagggggagtatgcaggaggagctgcagaggagaataagacaccctcgctggaggagcagtacgaggcggagactgcgggcatgagtgcagctgaaaggctccgctttttgaggaaaaagcgacaggagaacatgatggccaagagggagagtatcactggggacgactttatggccgaggtggccaacaatatgaagaagaagggagctacgttaaattccaagaagaaggagaaagacagcggtgacaaggtgatgagttggaaggagcaggagctggcggaggaggagcgcaagagacagcagatgcaggcggagatggaggcgaaggagcaggaggcggcgagaaaagaacgcgaagaacaggctgcgaaagagcgagagctacgaagggagcaggagcgtgctgagcaagctgcacttgaagagcggcgagagcaagaacgaagacagcgtcaggaagatgagaaccgtcaacgactggagaaagacgagaaaaagaaaaagaagaaggaggagaagaagaaggctttggatgggatggacaaacagggctctgagcatgatacgggcgctgctagtgaaaagggtgctactgagcaagatacagtggcaaccactggtaatggaagcactggggctcaagatgaggaggtttcagaggcatcatcaccagaacgggtgaagcataggagccgcagtcgaagttggggaagcaagtatggaagctcaattcgttcattgcagtacgagaacgcgaaggcagaggacagtgctaaggacgagctttcgctgatagaaggtgaagtaacatcagacccttcgcaggatgaaaaccaacgggcacgcgaagagcgacgcgtccggaaacaacgagagaaggagttggcggcattgaaacggaccgagcccgcgacatcggaatcgcaacgacgtaaatcggtatccagtgctggtgatctaacagaggactccagcatccgcacatccagcagcgccgaagctgaagaggaagccaggcaaattgagaagcagttgaggcgtgaaaggagacgagtcgccaagttggaagcggcgctcgctgcccacttgggtggtgatcatcacgaacggtctcaagatgggcattcagagcagcacgcaacgaacaacaatggctcggtttcggggtcagctcctgccggagcctaccctcagaatccaccgctgagcggtggaatgtatcccccgtatccgtacatgatgatgccaccgccaccaccgccgccatcaacgccgtatggatattactatccgtatatgcagcccccacccatgatgcccgctccgatgtatccccccagcatggtaggcgtgcccccagggtaccagttggtgcctcagacaccactgccttcgtccgacggcatggcaatgccgtctgcaatggtgccgtacagcgcggaatcaacaatggagggcgcctatggaatgcctttcggatccatgtatgggcagcagtctgcgccggagctgagcaaatgcgattgttgccagggaattggcgtcgggctggttgaaaagaacggcgtctgtgctcactgcaaccgcctccgcctagccttcattgtggattccgcccaaatgcgccagaggtgctccgtttgtggcgggtgggggttccagttgcttcaagcgaatggtatgtgcgagcattgcactcggcagactgcccagaagtcgacggagaagctcatggctgaaacccggcgccgcagcagtgtttccgcccctcgtgcacccttacctgtatcccagaattcgacaggaaacccgccaaagaacaatggcattgatgatgtcgactgggacaaatcctcatccgacgactcagactgggatgactgaggcgatgcagcctgttgtgaatatgctggtgtttagagacggaatggaatgagttataagcgatgaccatacacgataataaattactttgaatatatttgccgcgttctagtggcaatacagtactcggcgtgccgctacgagaccaatttacgatgcagcatgaaataggctcggcacgaaagttggtgctgtacaacagtgcaggcatgcattctctccatcgccttagcagcgcaccactgcattctccaaacattgtcttgggcagcaaggagacctcgccgagaggagacaaagccgcagagcagaaccatcgcgacctcattgtcattcctccggcagtctcgctgtatagcagcacccaatcgagcaacagacccacgctatctgcagcaaagtcacacaacccagccgcagcagcttgcagcgacattggagttggagtctgcatccatccatccgttcaacttgaagacacgcgcacccacccatcccttggttaaaactgccagccaattgactaccagcacgtacgacagcctcactcatagctcttaagacgctcacaaagtcacccgatggtcctcggcagcaagcgtcctcgccagcaaatggctttagtgactcggccacgtacgttccagaacaaccgcgaccgtttcggattttccgcactgccacgtacctgcgtcgcgaaaccttatattgtccgacctcctgtattaggtcaatcacatacaattcagacctgcatcatcctattgggtacaatgtaccactggtgtcctggcccgtcgcaatctagaattttcgacagggttgacgggtcttccctcccacttcacggcaaactaacacgcaaaagtatgcacgtcgcccctcctctggatcgatggaagtttcgatgacaaggcgagggcagcccaaaacaagaaagatcgcacttagtttgggcgccgcgggttgtttggctggggctgcaagcaaagccccctttcccgaggacaagtcggcggctcattcttcaatcttccctgttggaatcaagacacaagaagcaccccacacagagagaccatgagcgctccggaagccgaaacgtttgccttctcggccgacatcaaccagctgctgagcctgatcatcaacacgttctactcgaacaaggacatcttcctgcgcgagctcatctcgaacgcctcggatgccctggacaagatccgctactcgtcgctgaccgacgccagcgtgctggacacggacaagaacctcgagatcaaggtgatcccggacaaggccaacggcacgctgaccatccaggactcgggcatcggtatgaccaaggccgacctcatcaacaacctgggtacgatcgccaagtcgggcaccaaggccttcatggaggccctggccgccggcgctgacatcagcatgatcggccagtttggtgtgggtttctactccgcctacctggtggccgacaaggtcgtggtgcactccaagcacaacgacgacgagcagtacgtgtgggagtccgccgccggcggctcgttcacggtcacgcccgacacgtcggagcccatcctgcgcggtacccgcatcgtgctcaagctcaaggaggacatgctcgagtacctcgaggagcgcaagctcaaagacctggtgaagaagcactcggagttcattggcttccccatcaagctctacgtcgagaagacggaggagaaggaggtgactgacgacgaggaggaggaggacgagaaggagggcgacgacgacaagcccaaggtcgaggaggtcgacgaggaggagggcgagaagaagaagaagaccaagaagatcaaggaggtgacccatgactgggaccacctgaactcgcagaagcccatctggatgcgcaagcccgaggacgtgacccacgaggagtacgcctcgttctacaagtcgctgaccaacgactgggaggagcacgccgccgtcaagcacttctcggtggagggccagctggagttcaaggcctgcctcttcacccccaagcgcgccccgttcgacatgttcgagggcggtgccaagaagaaactcaacaacatcaagctctacgtgcgtcgcgtgttcatcatggacaactgcgaggagctcatgcccgagtacctgtcgttcgtcaagggtgttgtcgactcggaggacctgccgctgaacatctcgcgtgagaccctgcagcagaacaagatcctgcgcgtgatcaagaagaacctgatcaagaagtgcctggagatgttcgccgagctcgccgaggacaacgagaagtaccagaagttctacgaggctttcagcaagaacctcaagctgggcatccacgaggactcgaccaaccgcactaagatcgccaagctgctgcgttaccactcgaccaagtctggcgaggagatgacgtcgctggacgactacatctcgcgcatgcccgagaaccagcccggcatctactacgtcacgggcgagagcaagaaggccgtggagaactcgccgttcattgagaagctcaagaagaagggctacgaggtgctcttcatggtggaggccatcgacgagtacgccgtgcagcagctcaaggagtacgagggcaagaagctcatctgcgccaccaaggagggcctcaagatggaggagaccgaggacgagaagaagtcgttcgaggaggccaaggccgccacggagggcctgtgcaagctcatgaaggaggtcctcgacgacaaggtggagaaggtggagatctcgaaccgcatcgtcgagtccccgtgcgtgctcgtgacgggcgagtacggctggtcggccaacatggagcgcatcatgaaggcgcaggccctgcgtgacagcagcacctctgcctacatgacgtccaagaagaccatggagatcaaccccctgcacccgatcatcaagtcgctgcgcgagaaggctgaggccgacaagagcgacaagacggtcaaggacctgatctggctgctgtacgacacgtcgctgctgacctcgggcttcagcctggacgagcctacgacgttcgccaaccgcatccaccgcctcatcaagctcggcctgagcatcgacgacgacgacgatgccgccgacgagaccatggaggacctgcccccgcttgagggcgaggacgaggaggagagcacgatggaggaggtggactaagcgtgttcgcgctgaagtcgttgatggggacctcgagtgcaacctgaacgcctcggagaacgctgccagttgtccgccttagtggcgcgctgcagcttggagtcccgccgactttcactggttagctcttgcattttttggtggtgaggtttagttagatcttcgtagtcgaaggttacatatatttacgattcgcctaccctactttgctctcttgccattcttcttactgtgacggcatgggtatgctgtcagtggttgaatcgcgagcaagcaaagagtgtgatgactttgctgcgaaactcaatacttttgtcgaggaacacaactgaacttggaccagactgtcaatgacagtggagaacgtgatcgcaacctgtgtcctgattgatgacgagcaactgtgtctgtcgagtgtaccgactcgtcttaagctgctgacgctgacgatcgagtttgcaaggcaagtcctgtaaagctcatgtcgaaggtgccgaaaagtgaagccattttgaacaagcgatcttgagctgcagccatcacgtttgacaagcaatgtgtggaccacatcttccgtagctcctcgtccacacgtgcgttcatcatttgaccaccatgtcgtccattgctcttcgcctcggccgccgcgcgctgctctcgagccgccatgcgctgaagccccgcgccttcgcgagtgccaaggccgccgccggcttctcataccctggcgctcgctcgctggagcagatcgtgaagctggagctgctggagaacgagcaggcgccgcagatccgcagcatctgggaggagttccacgccgacaaggatgacgcggtggccacgacactgggtgccgacgagttccaggctctggtgaagcgcgccgaggccgcgccctacttcatcttccccgtgtaccgccaggagggcttcttcaacatgctgtgccagttccagcagtcgtgcttcctggtcacgtacctcgaggccttcaaggagaacccgagcgcggcgccgccctgcgtggccgtgtcgctgtacgaagacctgctggccaagaaggagctgacgcttgtgcgcgccgatgtgatcaacatgctggacaagaaggagtcgcagctcctgctgcagcagctgctgaccagctaccaggacgacaagctctacgagcacgtggacaagttcaacaacaagcccgagcagttcgactttgagacctaccgctcgatgctcaaggacgtcattgagtctgccgcgaaggcgtaaagtgcattgtaatgtgcaagctttcgtggcatgaacattttgaacaaaaatgtatgtcttaaaaaccatatcactcccctctctcctctctctctcacactctgcgtcttcctccaagaggaaactatcgtctagatgatcgctccccttactgggtcttctgggcctcagcctccttcctcttagcgtgctcggcctggaagaggacaagagcctgctgcgtcgtagcgtccgcctcaagtcccaaagcctggtactgaggagcgtgagcctgcgcgaagccctgcagcgagttgaggaagaactcgacctcgtccacctcgtccagcagactgatgtagtcctcgtcgccctcgtcgtcgtagccaaactgaccctcagcctcctcacgcagctgacgcaggatggcgtagtactggtcgtccaccacgtcctcggcgtcctcgttcgaggcgtagccgccctgctccagcagctcctcgaggtgctcagcgtcctcgtcatcgccctcggcctcctcgccgccctccagaatacccggagccgggttctggatcgactcggccagcaccttcatggcagcctggatcagctgcttgatgtgaggctgaagtgcagccgggatcttgtccgcaggcgcgcgcaggatcgacatggcgccgagcacgaacagcttgcggtccaggtagttgtcgtaccgggacaggtcgctcagccagatcttgagcacaccgtcagcagcgcccagcgagttgagggcatccagagtaagggccgggttgtagtgcagcagactggcgaacacaccgagcaggttgcgggccgtcgagtccacaagcggctccgagagcttggtgcagaccatcagcgtaataggaggaatggtctcgtccaccttgccgaacagattgtgcagcagcgagtacagcaggcggcacgcagcacagaggtcgatctcctgcacgtttttgctctcgaagaccgtcttagccatgttgaacacaagctccaggtagcgaacgttggcgcccgtggcagggtccgtagccgaaccggtaaggaagccctcgatgtcgcggccgacgaagttgtcgatgaccgggacgaagttggtcaggtagtccgaggcccagtcgttgaagctcgtgaagatcaacgggaacagagcccagaggtcgggcgcgatcttctggctgtagaacgccagcgagccgaggatatcgatgccgctctccatgtactcgacgtagtcgaagtctgtgagaatcttgtggatgaccggcgcaagcgtgggcaccagcagagcgtacagctccgggtggttgtggatgctcatgaggattgtgttgatggcgtcaaggcacgacacagcggcgagcgaggcgtcctcgtcctcctcagcaacagcagtgaactggccgaagaactccacgaacttggccacaagctgcagcgagaaaggtccgatctccgacgagaagcggtcaatgatgtgctcaagcgcaacaaccacctcgtcgttgccgatctcgtccatgaggctgaagaactgctccaggatctgcggcagacgcggacgcagcacttcgacaacagtgtcagagtgcgggtacatgaccacgaaacggatcgtcttggcggcctcaatgcgcacaggcagctcggggtcaaacatggcatccagcatgccgttgacaatgttcaccagggtctgctcgtccttgaacttgattccctcaatgtacttgcgcgagaagatcttgcaggcgcgcaggcggaggaagccgtgcgggttcttgaactcgggcagaatgtgggtaacaatcatcgactcgacctggtccttgtgcgccttggacttggtcagcacaccgtccagcgagaacagggcgtgcagcgcagcgtccttctggatgtagtccttcttgtcgtccggggtggcgaggtacgtgttgaggatgttgttgtagaacgacagcacgttcggcaggcagtccttgccacgcttggtgcacaggtcggccagcaggttcgaggcggcgtacacggggtccaggaagtcctcgaatacgtcgttggtcttgcgcacgaactcgtgcgggtcctcggcccacagctgcaggtccttcggcgtcaggcacagtaccgggtggatgacctcgaacagcaggaagcccaggtgcggcttgatcagcttgtacgtaacggccgagtccacggcctcctgcaggaacaccagcgcgagctgcacgacgcggtccgtgcagaagcggccgttcttgcgcagcgcgagcgtctccatcacgcagggcagcagctccggggcgatctggttgcggaacaccgtgctcatctgcaggtactcctcctcggccttcttggggttgccgtaacgcgtgtagaatcggcagaggatctgcagcgcccactttttgagcttccaccacggccagttgccgcgctcctcctcgtccgtgggctggccagcgggctcgccgccctcgctggcctcgggcagcggcttggcaatgatcatgcggaagatgttcatccaggccacgacctgctcggtctgcgcaatgtgcggcggcaggttggtcttgacgcacgaccagtacgtcttgaggatgaggtgcatcatgtgcgcggcctcgatcgagttgttggtctgcatctgcaccatcatgttctgcagcatggggaagaccacctccacgagcttgtagagcggcgccatgcgctcctcggagcggtactcgaagttcttgaccacgcggcgcagcgccagcagcgcgttgatgatacggttggcatcgccgctctgcacgttcttgcagatctcgtcgatgagcgtgggccacgagtccgggaagtcgaagcgcgcgatgtacgcgaccgtctcggccagcagcgagcggatgctcgagtcctgcgacacgagcagcgcctcgaggccgttctggcggcccagcaccttgtcggcggggctgatcacctgcatccactggccctcggggccgtccgcgccctcccagtacttctgcacgaggttcttgagcgacacggcggcggcctggcggatctcgcgcgtcacgctggcctcgaccgtgatctggatcagcagctgcaccgagccgggcacggtgtgcagcccggccacggcgtcctccgcggccttgcgcgccgcgccgtcattgctgaacgtgtgtagcaggatgttgtgcagagcagtcacgtccatggtggccgacgcttgaagctttcgctgggactcggctgctttgggtctgattgacgaccgcgtaagagctcctccatccaaaacggagccattgtagccatctgtagaatggtacagtgtaccgaaagcagacaggtgggtaccaaacgaggttttaccgcgaggtttttctcggtggaatcagactgtgtacgactggtgtggaccaaatcgactggaggagaaacgtctgagatgggatgggcaagaaaacacaccgatggctacaccttttttcgctgcaaggctggacgttgtactgtagatagatgtaagcctgtttcgaacaagactgccgatgaagtttctcaatggtatgtatcggatgcgtagccgacagcgcaagcagcgcttttgctgctctatacgtgtacgaaacttcatcttatattgaagtttcattttaacattgtgtgcggaatttcatttctctagaaaagctgggtttttactgcatcaagttagaaatcatattcactctatgcatcgcttaggtaggttggttgcaactaagagtaaatgacacgtacggcttgcatttgaaagtcgcaaggtatcgctgtatgctctatgattatacgcaccaacgctttgtccacagctaggcagtgttctgttatactacatgcaaccgatgcatgctttgtaccgaagtttggtttgccttcacgctttagcgcccgaactcgggctagctatcgttaaacatatattcccagagaaaccgtaggcaaggaggctttcagggacaactatatactgatgtgatctcatgatatgctcaaaagtacgtgtaccggtttttcgttgaagtattacatcctgcgataccgctaaagtggccgacaccatgacaataacaagcattgctattgctttttactgcataaagatcgctcacgctaaaattgttttacggaattgatagtaagaaaacttacgtgtgcgttttcaaaagcacaaaacaggcaagattatgaaatacttcagctgcggagtattttcataagcttaaagtaagaaaacataggtgttgaaaggcgttttcaaaagttcaaatgggtaatcttttcattaatttactaccaactgggcaatcgtgtacatatttgggtacacttcgctcttttatacgatggtgcctattttgagggccgttcctaaccgggatcgcgatcccaaacttggtctgtgattggtcagtttagtcccgcctatttccgactgtgtacccccagcgtaacccctgcgattcgagtttcggatcgcgagcgagcgggatcgccggatcgcgcagcggcttcggcgcagtgctaccgcaccaaatattcgttgctgcgtgaaaggatagtatcctagtaaactagagctcacttgctacgtgcagctcttgtcggtatgttttttacgtttctcatcgggtgcccaaagctatcaaaagagatttatagtaaatcctgcattttatttatagcatgttggttttgttgcgatctatggctgggtcgcgatcccgtacggattgcaggcggtgtcacctactgtacccctttggtcgcgatcccggttaggaacggtcctgagggttatgtaatgtcgtaaccctaggttacactctgttcaaatggcttcgcctttcatggcacggaaatccatcccactgcagtaaaattatttaagctgctagcgtctactggtagacgaggaatgtactatggtgctgtcaagtgtttaaaagtacaaagtggggctaggaatcatgccagcatctcttgattgagtccgaataccagccaatctatcgataaccccatggaccgtggggtcacctggacttggctttgaaccatgcccccatttggtatcaatctttgttgaggaacactgcaactgaagcttggcaggctgtcaatgacagcagtacacgtgcaagcgcatacctgcatcgcagacttttctgcagatgatgtgcgtcaactcgtctagagctgctcacgttggtgatcgagtttgcttggcatgcaacgcaagtcatgcaaagctcatggtcagctatgtctgctccactacttgacggccgagcgctattaccgctgcgaccaccacaagtagctggccacagggaagtcgagaatagcgcttgcagcgcggtgcagctcgcacgagcttggtcatcagatcatgttgcaaaaggggcaacatgcattctggattaatttctgctggaatggtggtctgcaactccgtgccgcattgtcgacacacaagctgcggctctgcttgttgccaaactcaggtggtgcagttcaatgaaggctctctctcagagagcctttgttgtgtctccgcgcgcagaaatgaattacgtgccttgtcatccactgggtggcaccttgaagcaattgcagtggagctcctagctggacagctactgtagaaagcctcgacttctgcatgttttccggtccccgccccgcattgcagcaccgcgttgcacggatcgttccagccaagccgcagtcgacaggtttttgccggtgttgactgctcatgcgcaccgccgaagcgagcccaatgtgacaggaccgcaacctgagcgagtgcgagccaccagggccacgcgcctttcaaatcgccgaggtcgctaggcgacaagcgcagattcgctgccggagctcgcaagctcagttaaaatctgcggattcactcacttccggctccctgaaacggctcttcgtaacggttttggcccgccaatcacaggccagccgttcagagacctcgacaaagtctccactgttcatgttcatgttctgccttcatgaagcttgtctgatgccattcgccgtgatggatggaggtctcgatacccactcccgctgacgcggacccgtatgaaccacactgcgaatcacgtggacggcctggaaccagtcaactcgagccttcgccagcacgtagcgaggcctattccttgcgccaccatcacgttgccggcgcaaaagaggaatcgcgtactgtttctgcgtgttaaagcgaggcaagcccaagctgcgtgttggggcctcactccaccgtgaccgcacgttagtccagcccaccgcagtcctcgttgcacgactccttgccagcagcattgctgccggcagtggccgactgtcagcgcagcgatggcgagtgcaggccaaaatacagaaacccgcgcagaaatcgagtggtggaccgccaccagcggtctgatagaacacgtacgtcagcggccgcacctcgattacataccggcttgacccgtctcttctatacctgccgcgttcccggcgctctcgagtaagttgccacaaaagatcgtggtatccaatccatccaccccctcgcccagcagcgtcacaactgaatttgcgccgctcgacgccgaccagctcagctccaaggaagggaacggacccagcagcctcagcttcagcagcaccatggccgacgtgatccccgtcgaccccgtggtgacccccgcgcccacggccgctccgctcgagtggcccgagaacatgaccaccaccgagggcgtcatcatcgccgtgctgcccttcgccgcgctcatcctgtgctacgtcatgctgcgcctcgtgtggcgcgtgcccacgccgctgcccgtgcgcgcgcccgtgccgtcctacggcgcgacgggcgagcagctgcagcccatcaccgccatcaagacgtcgctggttgaggagggcgaagtggctggagactacgaggagcactggtacaacacgttcgacttcgccttcctggtgggcatggccgtgtacgcggccgtgatgctcgtgctgacgtacttctacgagccgcagtggctgcacgagacccgcttctggctcatgcagctgcccaagctcgtggttatgatggtggtgtcgctcgccggcggcatcgtgtgccgctgcttctgcgacgtggacgagaagggctacatcatgacgaacaagtcgtccaagttcaaggtcaactacacgcgcaagctgcagcacttcgccgcgtacatggtgccgctggtgatcaaggcggactacccgggcccgctcgcgctggcgtggggcgacttcttcacgatgctgggcttcctcgtgctcatcaagcccatccgcgagcactccaagtttttcatgctgcagttcaactcgctggaccgccccgaggaccgccccaacacgctcaagtggatcatcgtgggcaacatcgcgccgggcatgttcatcctcatgttcttcaagtggctgttcgcggcgcagggcgcgctgacgttcatcctcgtgttcatcacgggcatcggcgacggcctggccgagcccgtgggcatcacgtggggccgccacaagtacaagacgcgcagctgcttcagcaagaacaagtacacgcgcagctgggagggcagcgcgtgcgtgttcctgtcgggcctcgtgttcccggcgctgcagtacgcggcgttcgacaacttctggcaggtgctgctgtcgatgctgatcctggcgccgaccatggcgtacgcggaggcgacggccccgcacacgatggacacgcccgtgctcatgatcgggtgcggcgtcatcctgtacgccatcgtgaaccttgtctaagcgctgtcactcacctccatctagaggagagagcgactgcgtgcactgctaagcttctcaagtaaaacatgtttgatgagcatctacctaatacactcgcttgtgtctaatgaattccattcaattggtcagtctagatggctcgagacctccagttgcacgggtcgaagtcgtccgagtcttcactgtccgagtgttgctgcctcttggccttcttgtgcttcttcttgaactcgctcactgccgtttcgacagctccggcgccttctgccgcgtcgtgatttcccaccgagttgtcgccatcagcatcctcccgcagcttcctcttctctgccttattgaagtccttcttcttgttctctctattgcggaggctggtcgcgcgctccagcgccacgcggtacctgtccacgtactgcatgttgtcgagctgctcgacggcctcgcgctccttggcgtcctccacctgctgccgctcctccttggccgactgctgctccacctccgccgcgaactcctggaacgcctcccagtcggactcgagctgcttgtccgccagctgctgcacgtccacgttgcgcgccttggcgtcggccagcgagtcgtcgaagaagccggcggggatcgctggctgaggcttcgaggcggcggcggcggaactgctgggctttgcaggcggcttgggcttaacgctcgacgtctttgcacttgacgcagcagcgcccctgggcttctgcttggcctccttcatcagccgccggatctcatcttgcgagcccatagtgtcggctaatagcggagctgctcgaatgtacaacttgaaaactgtgatttgtgatttggtttttggcatttgtgcagctaaaaacatcatggctacattgaagtgacattgcctaccttggtttaggtaatctcgaagccggcgccggacgaaatggacgtcagcagctttgctcgcagcaccttgtaggacgagtacgtgggcagcttgagcgtgttgaagcacgtggaggagctgggcagcagctcgtcgtcgctgcggatcgggatcttctgcacgcagaactggggcgtgagcgaggcgaaacccagcgacggcgcgcgttggcagctcgtggtgaagcgcaggaacgccgcctgctcggacggcgtgaagctcgccagcgcctgccacagccatgcaacgcgcttgtccagcgcgtagtagccgccagcgtatcgcgcgttggccttgaggtcgtccacgtcgattttgccgctcttgcccgagatcagcacttgcaactcgggctcgttgaacatttggagccatcgcgggtcgatgaggtccgacagacccaggcggaaggctgcgcactgctccctgatctgtgtgttgaggtagtagttggcgaccaggtggatgtagcgagtcttgttccggttcgtgacgggcacgttgcctcctcctgggatgatctcgacctccttttgctcgccgaacacgtcttggacgaccgtgtgggtcaagccgagatcctccacgccaccttcgtacgacttcaggaacatcagattctgcactcacaagaggcaacgttagcatgatagctgaagagaaccacgaacaattgttgaatcttaccttgtagatctcggggtccagtgacggcagctcattcagctgattgaacgagtgcagcaacttggagaggaagaagtgggcgaacttcggctgtaccacaatgccttcgtagagcgcctttcccaagatccgaccgacgaactgaaacatcgtaaggtggtcgctctcgcgcgaaaaatgacctgaagctgagttggggttgggatacaacagttgatcatgggtcgtgaggaacagtccgtactgcagatcaaacgcgagggtcgacaggtccagccagaactctttgaagagtccgccagcgtcgatgccaacttcttcgcgaccagtggcgttaacgaaaaccacgttgatacgcttcttcagacttgtccgaatcgagttgagcttcctcagaccgtcttccaaaatggcacctctgtgaatacggatgcgatacaccgagcagctttcgctttggtggatctccttgtccgccttgataagtcgctggaacagtttaacgcggtcgggaaatggtaccagatagggcatggactggatcagcttgtttgctcgaggtgtgtcgagcaaaacctcctcaatcagctggttactatcgagctcagcaataatcctgcaacccatgatatagatcagcgttagcgttcaaactttagccgaatatccatagacgtcacgcataacttaccagctcgtaacattgcaaaatggctgccgagaacaccgattgtatagaaccctcatcaggcgagtcgccatttctacgacaaacatgccaaacgcgacggattcggaagacggagcaaggttggcgtaggtccaatacgcctcatgaagcgcccgcttcagactcagcacaattcgctccacttcgcaaagaggaagtgggtattccttttcatacatctgcagtaaagacagtcatgagtaaataaacgcttatccaccactcaacccggaaatgtaaacgagattgttcacctcctcatcatccatcacgaccagaagatgctcgtatgtcatacaaaacagcaccaacatacacacgtacggatctgagctccgcgcatgcatcaaatccacattctgtgatgcatcaccatgtcagtcaaaatgatgaagggcagcaccacaatcagtagagccttaccttggcaaaatcttcaaaattcttggtatcttgcaaaacgcaccatagcatgtgaacgagagatacgttctgtgctgcaaccccttcgttatcaacaacttcaacgtgatagaaagccagcgtgttcagcagacgcattgcataggactgccgctttcctccatcgctgccccatcggaaaaggaaggtgccacacaggcacgatagtgccttgatattctccagaatgaaaggctccgtgctcttcgacaacttcagagatgctgccctttgcgctgttgtagacgcgacgttgctgacttgatccactcctctagcggcaatatgtcgcgcttgcctcgaggtgtttggcaattgggaagtacccgcaataccgctgttctcttcgccaccctcacgcctccgacgaagtcctgctttctcgaacaagcttctggcccatgacgcctttccgatcgatttcatcttctgccatgtcactgaaagagatgtcgacaatgaagacgaagatgcgatgtcgccaaaaccaaattgctcctacaaagggttgtgtagtgcgcataggtaagtccgagaatcaaaccaatacacaagaaatacttaccgcgatcgtaggtgcttcaggatacattgggactggtcgctgggcacccagcggatggcgaagagcgctcggggaaaatgaaaggaggtggttacacattgagcgcagatactgatcattaaccaaaatttgaagttgctcgttcaaagcctctggaaaaaccacgggcacggagtgagactcggatactttcgtccacgacacagctaccccggatgctgcgtacgttgcaggcggtacagattgaagcagcttggacagcagctggacctcgttcagtactacagcgtcggttttaccctccacactaccggtacgcacaaatggtttgttagactcaactcatccaatctgaatcatcaagagcacttactggtcagaaatccataagaggttgccaagaaaccaggcttcagaagcaatcccagtcaccggggacgcagggaagtcgaacactgacaagtgcagacccgcactaagcagtcgaatccacagcggaagattcgtgagttgcagcaacggatcagctgcaaccactttgttcaaaagtggcacggataaaacctgcataacacagcaacatcaggacactggagtaccccacaccaacagccaacagctcttacctccatcacaaacgcctcaagtatcccgctcgtattcgtcagcagatacaccacgaaatcgagcagagcgttagagtacgacgattcatgtacgcgagacgaaatcggcagctgtcctcttgccgatatcaacccttgccgaacaatctgcgtcaccgacgctttgggcatttcaaagtactgcttcttcctcatttccctcagcgggtgacagtcaaccaaccgaccagaaagtaggtactgctggatttccggcagcgtttccgtcaattcccgcgcagtcttgaagccaaccgccacttcaaccgcagtagaggtcgccgtactgcactgcagacagagatccacgaaccgtcgcagctgccagtctctctgcttgtcctcacttcctttgattccgtcacgggcagcggccaaggagtccccgaacagtgagctcaactgcaacaacctctcggcatcctcttcacccccagtatagaaaaacagcaccaggcgcagcagctacaacaacaaaataccataaaacactcatgagtctagctgaaaacatcgtatcggcttcatttctgcggcatttcacctcgaacagcgcgtcgtaaggcagcggcatgctgggcagctgcaggatggccttcaagttggcgatatcgcccagtttctggtcgaactcgactcgcgcctgggcccgcacacgtcgcgcagcgagacgcccgcgcacgaacgcctgcagctgccgcgccgccgcctcctgctccttgcgcttgccccgcgcctcccgctgctccttcgccagctgcagcacgcgcgcgcggtcgccccgacggcccccgccgcccgctccgcgagccaactcgttgtcgcgcaggaacatcctggcgagctcctcgtcggtcagatattctgcagtaagcttccgtaatttattttagaggagaacaaaatcagccaatcgtattcgaatcaaaagtgaagccatgtgaaaagctcaagaaagatacgcccacttcaactacggcgagttacaggcctagatatgcaagtggtggggctttagatgaggtggatgacggcgtacaggatgacgccgcacccgatcatgagcacgggcgtgtccatcgtgtgcggggccgtcgcctccgcgtacgccatggtcggcgccaggatcagcatcggcagcagcacctgccagaagttgtcgaacgccgcgtactgcagcgccgggaacacgaggcccgacaggaacacgcacgcgctgccctcccagctgcgcgtgtacttgttcttgctgaagcagctgcgcgtcttgtacttgtggcggccccacgtgatgcccacgggctcggccaggccgtcgccgatgcccgtgatgaacacgaggatgaacgtcagcgcgccccgcgccgcgaacagccacttgaagaacatgaggatgaacatgcccggcgcgatgttgcccacgatgatccacttgagcgtgttggggcggtcctcggggcggtccagcgagttgaactgcagcatgaaaaacttggagtgctcgcggatgggcttgatgagcacgaggaagcccagcatcgtgaagaagtcgccccacgccagcgcgagcgggcccgggtagtccgccttgatcaccagcggcaccatgtacgcggcgaagtgctgcagcttgcgcgtgtagttgaccttgaacttggacgacttgttcgtcatgatgtagtccttctcgtccacgtcgcagaagcagcggcacacgatgccgccggcgagcgacaccaccatcatgaccacgagcttgggcagctgcatgagccagaagcgggtctcgtgcagccactgcggctcgtagaagtacgtcagcacgagcatcacggccgcgtacacggccagcccaccagggaggcgaagtcgaacgtgccgtaccagtgtttctcgtagtctccagccacttcgccctcctcaaccagcgacgtccttggtcggtgaactgaggggagcgatgtcccttgagaaatacgatggctgcgaatgctgaggcagcgcgggggattctggcaccttccagacgatacgcagcagcacgtagctcagcaccaatgcgatcactggtaacgctaccagcacgattctttcagcaggcgtcagctcaagatgacggtactccggtgtaggggctgccgatagttcaggcgacaactccgtcgtactcatggagtctcggaaaagaggagacagtagtggtccagcaaagagatcgaggccaatatcttgcatagtgcgctggtcagcaaagcggaatgcatcgcttcgtcccagaggtatacacgcctctgattgggattctttttctcgttcgtgcgtcgctcccagcttgtctcaatacaacaaggggcgctgggactttgattggttaggatgacgcaagagattcaagggcgcggctcattggtgaccgaagagggtagcaagaaaagcaaggccaagcaatgccgcctagattaagcttgaactgtgctttgggtggccatgccagagtcgacaaatatgtacttcatcatagcacgcttcttgtatacatgtagatcctcaagaagaatatccaatcagtttattttttgcgtagatcttcataggaaactcagtgtttgccgcacggtaaaacccggttggggatcatatagggtacagatcagagaatggatcggtttttaatactaatttttgtattgaaaaacatatgtttcggcagcgaggagcgtagccatagcaaacccgcgcggggtgcccgcgaagcagggccgcgcggtatttgcggaggcgggcccagcgacgagcattccagcgaacggacccgttgccgcaactcggagttagttttctttttgcgggggtctgggggtgcaacccccagaacaccttttagcacgtcagatccaatctcagatctgtaccgtatatgaccccaactggaggttacctgccgcactccatgcctacgggctcagcgaagccatgaccaatgcccgtgatgaatacgagaataaatgtcagcgcctttttcgtcgcgaacacccacatgaacatcatcaacagtagctttccgggggcgatgtttcccaggatgatccacttcagcgcattgggtcgatcttctggacggtcgagcgagttgaactggagcacgaaaaacttggaattctcgcgaatcggcttgatgagcaggaggaagctcagcatagtgaagaagtctccccatgctcgagcaaccggcccaggatatccagatttgaccaccatcggtacaatgtaggcagcgaagtcctgaagttgaccttgaacttggatgatctgctcgtcaagaagtagcccttctcgtcgactttgcaaaaccagcggcaaatgagcccgccgacaacggacaccagtatcatcacaccaagtttgggcagctgcatgacccagaagtgaggctcgtgcagccactgtggctcgtagaagtaggttaacaacagcagtactcccgcgtacacgatcatgccaatcaggaacgcgaagtcgaacgtcttgtgccacttagctgcgggctgcgagttcttggtttgcggcacggaaccatacttcggcggctcgcgttgcagaagttcaggggaacttggcactctccagacaacgcgcagtaaaacgtagcacagtatcgaagcaacgagtggcagcgcgacgagaacgattgcttccgccgcagtcagctcgtgcttcgggacatatgcagatacggtcgagtccatcgtgtttgccagagctcgataaagcagcaatgagcttcttgactgggcaagaagacaaaaaatgaaggaaatgatggcgcttggtcccagatcccctgctcaagctgaagttgaagtgctccgcgatctgtatgtggcacacctcaattacaggtttggggacgaagcgtacactgatttggggaaatcctactcttttgggaacttattcattctcatgcctgcggcgccggcatgctgcgcggcgtgaaccgagcggatgacgagacggacgacgaggttttggctgagctgatgcgcgagggcgagaaccgactggcgtccgagcagcgcgcgcggcaggacaggcgcgtgcgcgagtcgcgctggcggaagttcatggcggccgtcatgttcctgagccaggtgttcgtggagctggggaggcgcggcctgcagtgtctgcagcgcagcgtgccgcgctacgtcgcgttcgtggaccggtggctggtgcagtcgatccgcgtgtcggtgcatcccaggaagaagatgagcacgctgcggttgctgctggcgctgggcctggcgttcgcgctgccgtacattgtgctcactattgggcgcatgcggttcccatcgggccgaggagctaaagtaaggttagtaagctatccagtggcttgacttggctacatgtagatgatataacattcggagattcacaactttcgtggcttcttttgtattagcgcggacgagctggatgaagagaaaatccgatcacatattattgtggaccgcgtggacacgccgatgccggggcgtcgtcaaatgttcctgcgtgaaggaggtgacgggctgaagctggacagcacggagcttcgttgcgagaacactgtccaaggcgtgaggctgctcacggattctatgggtacgaggtacattggatcatgcagttgctgctggatgggctgtattaacgatgctgttgctgctaccgctactgctaggctatgtgtgcacgcggtcgcagctggacaaggtgaaggccggctgctgcaacgagaccgacgccagccttccccggataaagcagttcacgtgcgaccagtgcgatacgaacccgccgcactgctgcgacgtcttcgagcactgcgtgtcctgctgcatgcaccccctcaacgtacgttttgtgttgctgcgatggccgcttgggcagttgcacctgcaggctgcgcacagcttcgtggctcatttggtgtaggccccgttgagtcccctccacttgaagacccccagctgaccttgaactgttttttcaccttgtgcttggcgtctctcagactggcatccggcgagactacttgacgcacgctgacccgaaccatccggtctacagcgacccggccgagatcaccgtgttccagtactgccagtatcgctgccgcacgtcgtccgcgagcgtgcagcaccagaactcgtaccgaaggttggttttgtctcggacaacagtgcatcgttgctaccgggcgcctaatgtatgggatcacctgttgtgctgcgccagtcaccgctcgttctgctacgggatccaccggccgctcaaggtgctgccgaccgtcaacagcgacggcttccacgacgaatggttcgttcttgcactggtttcagtcgctgcccgctctgtgtgtggcttgcccagctccgatgtctaacgcgcatctgcgcgctcatccttcttccgccgtgaacaggagcggcgcgtcccgggagggcgcgcgagaccacctcgtgccggcggcgcagctcgagctggacccgttctaccgagagtacgccgccactgctgctggcgccgactgaacgccggacaaggtggcgtttcgacaacccggactaagcctgcctcaagatcaggatcaagatcgcggcgcgccagcttcaaggtggccacgcagccatcgctggggcgtcgtccgacgacggtcgtcgacgaacatggttgaagttggcgtatcttgttgcgcaaatcgcgcgtcgtgtcaaatgggcccccatccgcgccatataccatggctgcagtcggtcgatctttttctcttgtccttcccgccgccttctagggggctgtcgtgcctgtagtgtagggccccgctcagtgcgctggcggcgaggtggcggcgtgctctcttgctgctttgggacagccaagcgagccccaacgctcacgagcgcctgcattggacgggcatgacgagcagcggctgcgggcatgccgttctggaggctcttggtggctcttcatgccgggccggaggtttttggaccgaatacggagctgaatactgagaacggcagacgaggtggcccatgcttcaaccaatgcaaaacgcaaggttggaccatgctggaccacgcagaaaacgtgctttccgcggcggattctctgcatcgaggctcgcgggggcatcgggtctggcagtgcgctttggctcacgctgatgcgctgggcgcatgtgtttcggagggcagccacctgcatcagattcgcggtgtttacggtgcgtgcaatccagcccatacaattcccgagtgagtcacatcgaggaaaagtatcttggtgtgcgctcgtagtgtgccggggctagcgcgcggcgagttccgcagtggcgcaagtgctccgccgagctaagatgttgtcggtcgtcgccgccgcgctggccaaggccgtaagttaatagctcgcccccacctccgcgttgggactcccttccacttcccgctctgagcgtgtcccaacattctccatagagaagacagctgaaaaaagtggagcggcccaagctggtcgacggcagcaaaaaggcatcgactgccgccgccggtcacgcgacgtcaattagcaaccgagtgagtcgcgaaatcggtcaagccggcaagtcattcgcgaccgggcttatctgagcgtggggcgtgcaagaaacccgagccaaccgcaagattcgtggtggtcgagcgcggcatactgagcgccagtcaatcgcggtttccaagtgacttggctccagtatgcttaactcaattttttgctagttgacgcaagtacgcattagcactaagtgcgcaatgacttattcgatacccccgcgctagacgatcgccatgaaatgtctcagcataaattttgtagctccgcgcacctgcgagatagcatgccatccgaataagtacgtgtcccactgtatcagcaaagtgggacgcgcacttatttcagagccccccatcaccacagctgccttcaaagtgtagcacacccggcagtgcaaggcctgcaacatacacgcagaaacacgcacctcaccgccgagctcgggcgcgtgggccgcaggattatccaaccggcccactcggcaaaaaacgcgaatccagccttgtctgcaaggcgccttgcaattgctcccgtcgtctggccgcttgatttgcaggccagcttggcgcagactcgactcgactttgcgcgcgcggccccctccgcagtctctctcggagcgttctcggccgttgcttaggcgaaaatggcgccgtccttcatctccatgctcatgacacacaactccgccgacaagcggggcggtgtcggtgccggcccggctgcagccgcaagtgccggtgccggcacgccggccggtgtgcagccccccgtgacactgccgcagctggtgcgcggccgctcggctcgcgccgagggcctgcagttcggcctgcccatgggcaccttccagcgcacgcccttcggccagccgcagacagcaccgacacagccgcacgcaccttggaaccaccggcaaaaggtccaggacttcttccgacatacaaccagctcgctcgaccccgacagcggcgatggcgacgagcaggcatcacataggaacagcgacagcgacgaggacgagaaggccgcgcagaacgacgacaaagccatcgacgtccgggacctcgtgtccaggaacgccgcggagagccgagactcgtccgcgacgtcctccacgtcctccgaggacaaccagcaagacgaaatgcgcggcgcagtgcgaggccgcggacgactacagagcgcgctggaggacctcctcgcaagacagcaggccgaggagctgcaggacgaagagcccgtcgacaggaccccgcagaggcggaagaaggagcgcaggagatacgactcgttcgacatcatggccgacgtgcggatcgaagacgagatggacgacctggagtccgtgtactccacccccgcgcgctcaagaaataacagcgaggactttttcggaggggggctgctcgacatgctctcgcagcggcatatgcccgcgggtgtggacagacacgctagtgtagcggacatgctcgctaaccgcgcgcttccccctccgaaccaagccacagactcttccgatgaagaggaaccgccagtatcaaggccctcggagaccgagacaagcgtgccccagaccccccagaagagccccgccatggacagaagtaacatgctggccgagatgcttgcgaagcgagctgctccgccatcggaaacgagcagcccgaagaaggccccagctaagaagaccaacgcacttgaagcaatgctggccaagcgatcttccccgccgccggagtccccgagtgaggagacccccaagaaggtgaacccgttggaggcgatgcttgcgaggagaactgcgccgtcacctccaccggcggctgctgtacaggaggaagcaagcggagccgcgcatcctttggctgcgatgttgaagcaacgccaagcggccccgcagacacctgtggcagcaacagctgaggtcgcgtctccgtcacctgctgcggcttcggatggcaacaacgctggaaaggatcagaccccgctgaaggaccacccgacgtaccagaagtacttcaaaatgctgaaggtgggtctcccgccgcccgttgtcaagcacaagatgcagagtgagaacgtagatccggccgtcctggacatggacccgaacaagcccctgcccgaggcgccagcacccgctctcgacgcggaagccgaggcggcgtaccaggcgcagctgaaggagtacgaggcgaagcacggcaagtacttgcaaatggtgaaggtggggttgccccccgccgtggtggagcacaagatgcgcatggacggcgtggatccggcctggttgcagggaccccccaagaggccggagccgaagcctgcagctgcatccgagatcacggaggaggagagagctgctcaccgcaagaaataccacaagtacttccagatgcttcgtatgggcttgcctcgcggcgctgtggagcaaaagatgcggatggccggcctcgacccggcagagctgaacggtcctcgtcaggcggcgactcctgcgcaggagccaaagaagacgctgaaacgcaaagactcgatccgcaagaagcttcactgggagggaaagcggcacaggacacgtcgcgacagtctgtggggcggggacgccgtggaagaggcgaaggaggcggtccagatctcggaggagagtcgcgcgatgctcgagaagctgtttgtgaaggatctgaccgagagcaagaagcgcaacgcctccgtcaagtcggatggtgccgctgcggccaagaaaaagaaggcgatggtccagctcatcgatatgaagaagtcgcagaacattgccatcactctggcgcgcgtgaagttgacgttcccggagctgaagcgcgagattttggcgatgaacccgtccgtgctttcaccgtctcaagtgcggtccctcatggacatgtggcctgaccgcaaggagatggaggccatcaacgccttcacgggcgacatggcaacaatcggcactgccgaacaatttttgatggaagtgcgcagtgtgccgcgcttccacgagaagcttggatgtctagtattcaagcaagagttcccctcgcgcgtgcacgagctgcgcgagtcgttgggccttgtgacccgaggtgtgtaccaggtgtgctctagcgcagaactacgccaactatttatttatattttgcagatcggcaatctgctcaacttcggcggcgacgacgagcagcagggcgtcgacgccttctcgctgggatccctggtcaagttttcgcagaccaaggcgtttgtgggtggcatcacctttttgcagtacgtggtgcagtcgatcgagcgcgacgtgccccacctcgcgcacttctacaatgacatcgacctcatttccaagtgcagcaaggtggcgtacgcgtcactggcatcggagaagaacgggctggaggctggcttgcagaatcttttgcgcgaggccgaggcctcgattccgcctcctaccgctagcgatgctgacaaggaggcaatgatggcgtacaacaacactctgatgcagttctgcaaggaggtcaagacggagctgtacgcactccaggagttgctggacaagctgaacgcggccaaggcgcacttcctcgagtacttcgaggaggaggacaccgaggaggagctggacgtgctacttacgcacattgccaacttcacgaccgagtaccagcgcgagcatgacaagtaccaggccaagatgaagaaggagatgattggcctgtactcgaagttctcgccggccaagaacccggtcaaggcggtggagcccaagcaggagcccaaggcgccgcacggcaagatgcaccacggtgccaagctgccgcaaagccagcatggtcatcacagccatggcaaggcagcgcacccgcaccggacgtccatgcctccgcagatcgaccaccctcagccgatccgtcagatccaccacgcgcgggtgcttcacctggagatcccgcaagacgacgacatggacgaggtctcgtccactgcgtcgatgtcgcctaagaccagtgccgccctgtctggaggcacaccctaagctgctctacatgtatcagcgccgtcgctcttatcggagccatgtaaatacctagcgtcagacacgattcattattgccacaaaccaaatgcaagtattatgaggttgtgcgatcgccaccaagctctattgcaatttgcgaggctctcttgcggctcatgatcggcaggcattgaccgcagccaagccacctcggccaagtagcaacagccgggtggtacggagcactcgagtgactcgaggcttctttggcagcgtgggagcaccttgttgtcgatacttgaagcggtcgaggggctttccaacaccacgaaggccaccgatccgcagagtcatctgcagctgttcctgccgccgttcccagccaagatatcgttgccttgaccgcctgtcatcaacaccacacggggcacgtagggggatagagaatcatgccgctcgctacgtggactccttggacaactaggtactataagttctaccaacgatgtttagcttcagcctgaagttcaggatacctaaccaaagctgacggcaaaccaaagtgaagaacagcttaaacttgatacatttgcttcattgatccatcgtacgacttaaatacttgacttcacagatacatagctgttcacggagactagactggatggcacgacgccgatgaatacaagctagagacatagagacagatacacccgagcgatagacggcagctcgagttgtccggagtcgactccgttgtccagatccttcctccccatcttccaatgaatgagggacgaagtttcgtgcggtagttgagagagagaaggacggagtttgggcgagtcgaccgggtagacgaagacggacatggtcttcagaccgcgagggccgcggcgggctcgggcttcacggaggcactggagttcatgtcctgcttctcctcacgaatgtgcatggtgcacatgccctggttgcgcgatagcttcttgcagccctcgatcttacagaggcgaccgcgacggtgcacctcgcaaaagcctccaccacggtccgtgcgcacgcagccctcgatcttgcagttgcggaagccgccgtgcgtggcacagaagttgccgcgctgggcgcccttggggcatccagcggcctggcagcgcttgccgccgccgtgggcacggcacagaccgccgccctgcgagctcttgttgcagttggggaacttgcagcgagcgccgccgccgtgggccttgcacaggccgtgcgactgcgcggccttggcgcagccctcctccttgcacttcttgccgccgccgtggccgatgcagaagtcgccgttctggctcgacttcttgcagccctcgatgctgcacttgcggccgccaccgtgggtcttgcagaagcccttggagcgcacgcggcgctcgcagccagccaccttgcaggtcgccatgctcttgggcgacttggtcgtcggcttcatgttggcagccaccgtggcccgggcgaactggtccagctcgggcgagcggaagagcatttcctgctcgatctcggggagcaggcggtcgagggagtcgaaggccgactcgatctgctggatgtcctggggcatgcccgggagtgccggcttgggggccgaggcgttgccgaacacggcgtacgcgagggggtcgaggtcttccatgggcatcttggcgctgttgtcagcgggggtgaaggcgatgggctcaacgttcatagcagaggaagaggggatcggctcgggcttcacaacgcgctgttgcggctggtactgcaggggctgctgctggcccatgctgatctccagaaggtgctgcatttcgttcacgtgcacctggcgaggcggcatcggcacgttcatagtggtctggtatccctgctgttgctgctgctgcatgaccgagacgtatccgtggctgtgatgccgtgcgagcgtcgggggcatgcccatggcgaacgacgtcgccggcggctgaggctgcagctgctgctggtagtaagtggggttcatctgacgcacgggcatggaggtgtggcgcgtgagcaccgccggggggcaggcaaagccgaactgctgctgcgggcgcgaccaggcgtcgacgtcgcagcccatcatgcccatgtctccgagcagcatgtccgagtactggttgtgctgcgccatggcgacgggcggctgcagcgcgcgcacggtcttgtgggccatgctcggccgctgctggccggtctcgctgttatgcgcgctctcaatggacatttcgggtcggctgcggcaaggctctctccttccttcctgcgattgtcttgcgcggctcgattttacaactgaggcgctcgcacgtctcggggcgtcggtcgctcgctcgcggcaaggctggattcactcgttgctaacggcgcggacctgctgctgcacggcttgaagggggtctcgtggcccagaaccaagagaacgcgcgctcggatgggacgagcgctcctcgggatgtggagcggaggcacgagagattcgctttgcttcgaaatcgaatgcaggcgattgtcgaggggcagtgagagcggccgacggcggcttggaaatgaaagaacgcgctttgggatcggcggtgggcggtgggggctgatccgagcgtcgattgctcggggtctgtcgcgcgagcggcggcgcaaaaagaagagtgagagcggccggcgcgacggtcgccgcctgggccggcgaaggttcttggccacagcagacaacgccccagccgctggcggatggcgcacggccctcgttgacgttggtgttgtcgtgacttggagcttcggggccagtggtccgacttcctctaacccgaactgactcgcggcaactagtcagcagcatacaaactccaagtcacctcggccctcgcggcatctggtggaggcgagcctggcagctgttgttgacgtccagccttcgctctcccgtactcaaccaacatggcaggcgagagccgtgctgccaaggccatgacgaggatacctaggtattatctagtacttggtatccgccagcgcggcggcgacatcgatgacggtgacagcgttccagttcatgagattcatcgctacagtactggccgatgcattcattcaatacactacatgtactgcagtgcagtggccgcactgcacgctcccgtggcgaggaagtgaggtttacactgtcagtgcactacctacatattacgtaggcacctgtcatacagtaccacacggctgcaagttgcagcggtccgcttgctcgatccgttagtttttccggcggcctcgtcagtgccgcctagacatgcactgcagcgtcgactacccttatccaccaaaacgcccttcgtgtacatagctgtctcgatacagttggtggctctcggcgccgcgtcggacgagtgtgtacatgtatcgcacgcacggcacagaggggccgtggcgtggcttgcccagcgcgaaatcgctctccttgacttcaagaatgagcgtcgcggtcgtggcgtcgcgcgccaagctctgcagccgcacgatggtgctcccgcagcgactatcaaagtacatcaacagcaacgcgggagccacggccgcgaagggcagcgcccttccagcatgtcgcgggccattacagcttgcattctctctctacagaccgcaacttcgaggccacgcgcgatttgcggtgctcattctgccgatacccagcgaggatcatcggatgtttcgtacatgcgtgtgtagccaccgctgcaagcgggggccggatgggaggatctcgcgtcgcagcaacttcactcaccgtgcggtcgctctcagctcgcttcaagcaagttgcttcaagcaaccaccatgcatgcagccatccaacagcgcgagctgatttctggtgacaaatgacaggagctggacttgtgtctgaccgaatccagctccttctcgcgataactgtacggcacgaaaacaatgtttttcttttaacgaaaagtccgcgctgtcattgcgctgtcgccgctcgcaaattccagttgcaacaggtgcaagatgttgttacagcggcgcgaaagttttcgctctcacattacacatggagcgggacatgcaagatcgctggtttgttgggcttgcaatgcactgcacgtatacgtttaacttgctagcgttcatgatgccaatggccgccatcgccgttgtcgagtctgcgctttcgaacagcgccgccgccattgcgatccggtcacgccccccacggagatagataccgttcgtatcgaagtgaacccgcgccctggtccgcgctcagatgtaaatcgagcacaaatcatcccttttgcaacgcaacgacacgcttgcgccgagagaacgggctggctgactgccagccagccggccgctctgcgcacgcggactcggtgtcgccgccgcggcgtgggcaggcacggcagaccctgctgttgtcagcgcttcacggattcaagcacttgtcggcagctccgccactcgatggatgcgtctgcagcgagaggcgagggtcccatgcaacagtcaggcgaccaagctgtgagatcccttcaagtcttcgagcggtatcgtagcggttcgatcgagcggtgggaaagcaaatctgtgcgcgaacaccccagcacgccggccgcccacttggagtcatgtcaacgactcgttggcaacgaggctccgcggcatcgccactgcacgtagacatccgtcagcgtcggctaccgaagccggagagacaaagctcgcgcacagctcaagtgtatttggcgcgggccggtcggaggtccacgacgttcggcatgggaggttcatatctgcagtcccatttcggcgctttcacgccgaaatggagtgggccgtgttcttccgtagtagagctgcgcgtcaactatcgcagcgcgcctggatcagttgaagccgaccggccaggcccgggttcagccgaggtggccgggttcggccgaggtgattcttccgccatgcttgaggctcggcacaagtcgtgtcacgacgcatagccagcattgtggttcatgcttcggcgacaagcgaattattgtgggtagagtgccgccaccaggctgaccaaccccgcttctcgttggtactgtggcctgcttggtgcttgtcatggttgcaggcaagtcgagcggagacttgactgacaagcagccaagtggtccgattactcacctggtacaatgtaccaaacagagtgctccgtcgcatttagtgtgaccacatagttacgtgtggtttacacaccgccagatggttggacgagaagagcctgcgtatccgccccgctggcgcaggttgccactaagccttttgccgctctcgagatcaagctccgggcggctgtagcttcctagttctttcctgtacctgcgcctatgccgcgcgtgtaatcttgtataatagtggtggagcctatgatgatcacaacactatgtccaattactgcatgagtggcggggttacgaccgccgtcgcaatgcgtcgaaagaaccttctgaggcccccattcaaatcataccatagctacgttaccgtagtgttagcctgctggtagcagaatgtctacatgtagcactgtgtgcacgcagagcaactacactctgtctgcaggcagctagctgcagacttaaatacgctcgtccgtttcgcttgccgcaggctgtccgttacactgcgtcgagtgtcgacgagaaaggcataggcataggtgagaagcacgagcgaaagaaggcatctcctgtttgcccgctgctgctgtagccatgggcgtggatctgttcctgctggccgtggtgatcatcatcgcagtagcgctgctcatctgcaacgtctacattctggtctacttccagcacgacgacgacaagaacaccgcctactttccgaaagcgctcgtggtacgatcatctgtcttgctttgtgttggtggtacacacagtgctaagctttttcgttgcaacggcaggtcttcgggctgttcttcgcagaggcgacggtactgctgctgccgctggatgtggccaacaactcgacggccatcggctgcgccgagggctggaacacagcgtgcggcaacatcaacatggatctgctgtggctgatggtgttcttgtccatcgtgatctttctggtggtgctgctgccgttcgcgatctactactacgaggccgacgacggagaggacaacccgaagaagagtcagtggggtgaggcgatcaagatggaggtcggcacggtggtcgtcgccgcggcgttgatcacggttctctacatcacaagcgccgagagcaacgtcccaatgcgcgcgttggaggtgaactccatgtctgccactgcgggctttcacgcttacgtcgacggcacgacactatccaccgacgtcgtcgatgcagccagcaatgtcacggtgcagcacattacactgaccgtggacgtctcactgccggtgtacgttacgggtctcacgagctttgtcggctggttcggcttctcgattttctgcggcgttggacttattgcgctgcccatggacttgatcctgtaaagatacttctcgctacacggtgctgtactcggtattattcactgacgttgtgtgttgtgccgctgcaatagtgctttcttccatcgcccgaagtttatcagtgctgacgtctacgcgatccagaagctgattcttcagcgccgctcaacggagctcctcgagatcggccgatccatcaagcagagcatggatcgccccggtcacggacagagctcgtgggaacgcaagaaacagcggcggctggacttcgtgacgcttaacaagttcaagcagtcggtctacttgctcgagggcgacgtcgttgacctgaaactttgtcacgaggaataccggaacttcaacccgttgaagccgattttcaagctgctcctgggatgcattgcgagcgtcatcagctgcatgtggttcttccacatcgccctctacatgctgccgaacacgccgctgctgccgttcctcaacacgtacttcatttggtttgaccgctggttcccgctcttcggcaccatttcggtcggcattttcagctcgtacctgctcgcttgtgcggtcaaaggctgtttcaagttcgggatgcgttgcttctgcatcgcgctgcacccaatgaagctccacgggacgtacatgaactcgctggtcttcaatcttggtctggtgctgctctgtgcgattccagcggtgcagttctgcgaccaagctttcgcagactacgaccgtctaacggccttgcgaacgctcctgggagtgcagatccactacttgaaaggcatgcgcacggtctgggactacaacatcttcatctacgccatcatcattatcagttctatcacagcaggcatcctgatggcgaaacctcgagaccgcgcctcccccgttgacgacatccgcaagagaatcgagcgtcaggtccgcgatactgcggcagccaactctgtttagcactaagtaggctgtccgtggatcttcatcttcatcttcatctacactttatccatgatacaccgacacagtaaagctcgtagcaccaatgaagcatttattcaagatactattgagttgcatggttgcggccgaaaagtcgaccaggatcaacaatttttaggggcttgtgacctggagacctcgggctcttgaccacgttttgaagtgctcggagaaccggcgaggctttctccccggcttgctcctgctcatcttggtgctgctgttccccgtccttttcttccttaacttcgacagaggttggcgatgctgctgcttgagatgtgacatcgggtaatatgtcgatgcgcaggagaccgagatctctctcgtcgtactcgtcaagaagtttctgcagccaagcgaagattttggtgccagcacccgctgcgattcggacgaatgcgctttcagtgaatgtgggttcctggaagatggcgcgcaatgctgcggcttgagagggagctagcgtgctgccacgcacggcacgcagtcggtggctccactccgacgacttgtgcaacacttgacgacaatgagcccacgaaaaatcggacggcacgaactgctcctgttgctttggggtcggcttgcttttccgtgcatcgcgctgttcgatgggcggctccagaagcaccaccaaacacatgaagagatagtgcagctctcgcacaggcacgcggatactgcgcagctttcgccattcctcgcgtgaaatacccagccactccaaactgcccgtgctcttcgcactaatcacgctggtaatgccttcgttagcgatctcttcggctagttccgcatcttggtttcgttcagcagcagtaatctctcggtggcggaagtggttgatacggccctgcttgacgcccttgcgacctccaccgtcgcttgtcggctggtggtgcttcggccaagttgggacggttgcactcgacataacgcacgttgccgggacgacttgctgcagccgttcttgattcttttccgttgttgacgatacagctccttcagctgccgcgatttccgccgagaatttggcagcttcggcgacggaatccatgtagtgttgctccagaaccagctttgcagcttctgtggagagtttgtagagctcagcgccacccagcagccgcccactgagactggaatcgtggtgcgctaccaccagcaccacatttgtcacctgccagcgctgcaacagatacagcaagcggtctccaactcctatcaaagtattgtcgtcgcactcctcaacgaggtcgacaccgctcgggctgcagtctttgcttgctgctacgcgaatgcgagacgctcgtgggaactcctggaacttccgcagtcgaggctgcttcgccaaagcttcagagacaagaacactaacatcttgctgctgctggagaggcgccacggggatcacgagaccttggaatgtatttttcttcaggaggagttgcggacctagcgtggcgcggcgacaagcagtgctgctgcgtcgcggagaacccatacatgaacccagtgaagcgtcagagaggagaggcagtgcttgaaatgatctagtgagtctcgattgcttccggttatttatgcgagcaagtccattgagtccgcctgcgactattcttaccttccagctctatttgttcggtacgacgctcttgctgaggatctcgtagtcctgggagtcgtctccgcacgcactaggcgaggtctcgtcgatctcaaagcccagtcgttctcggtagaacttcatagcgcccgtgttgctcttgaacaccgtgagcaccatgagctccattccgtgcttcctcgccaccagcagcaagagttgcatgaggaacttgccaataccgtgacgttgcgccgtcgaggccaattggacctcgtacaggtacaaaacgagcgccccgtcgtcctccacgaagcggaagtgcgcgaagcccacgagtggcgcaaccgactccgagtctgtggaggtcacgctctcgtcgtggaccaagagataccgtgcctcgtcctcgaacaactctttgcgcttagctgctgggtcgtacccccagtctgaagcttggtacagagtcttcatgttgccctcgaagagagatacgacgctctctcgtgtggactccgagaggtctttggcttgggagcctcgaatggaaacattggcgccgttgcgagcgtagtgcgagaacgcctggaagtccaccatcacgtcaggtgttgcgttggcggcgactagagtcgggtgggctggtccctcattggtgaacaccgatgaggcagtggcctgcttggactgcttggccttcttggccttggacttcttgggcatcagtactgtgcagtgcacagcacagtgtgcgccggtttcaatttgaaactttcaaagtaagcagctttatgtcaaattgaccaataagcagatggtatgtcaactacagtttttataattggttgatattgtgtttttcacctgaattagctaattcccttgttaattccgggtcgtcccgccgtggccgaattaagagcgggttaagttaaggcggaataagctaatccagacgaaaacagagcaatggcggtttgctacccgctagctctgccatgctgccgtcgactggctcgcaaatgctgatcgcgggtgttaaggggaagcacccacacattgtgggccataatcttaggcggaattagcactaaataagcgttgtccacccttttatggatctatttcgcatgaatttacagctcaccgccataatatgttgctccgctgacgcagtgattttgagttgcttagagaccgacagagtgtccactacaggctgacacccccactctccaaaatagatcgaacgaagttgccacccagttgaatatgtagaagttgctcagtgttccgaccatcacatctataccccatcagagaccccgcatacactcctgaccaaattaatccgggcacccacacttttggccgtaactccgtcaatttttaagtactcgcactgcgcttttgatatgtcatttgtattgtatagagtagtcgggtgtttgtgttaacatcctgggttttgcggtttgtactgtagctcccatacaataaaccactttgaccaagtggcccaaacttcggaccacccctgactatactaaactcaagacaaatgtgctgaaaggattgttcatttaacataggatgatactgcttgctggccatccatcactttggtggatgctcgcgcgccgtcaagcgctctagtttccaagcagcactttcattttgttcaaggagatgccagcgtggctaagcgacgaagagaagtgtcgtgtgcgtggacttcgagaaggagggctctcaatcagagccattgcgaagtaggtcaagaggtcccgggatgctgtcgtgctcgcgctgtctgcgccccactggaatcgccggaagccaggacgcaaagtcgctgtgtctgagaggctggtgcgactgttgcgcaaagcagccagcggtgactactccgccgcgtagctcaaggtcgagtgccagtgccagtgctccactcgcacaatccgtcgcctcctttctggtgtagactggcttgtctacaccaaaatggagaacatgcttccgttgacgccggagcacaaggcgaaccggctggtttgggccaaggacatggtggtaacgccacaggcagactaggaccgcatcattttttccgacgagaagaaattcaacctagatgggcccgacggaatgcagcgctaccggcacgacgtgcgacgaccgccaaggacgacggtggggcggcaaaatggcggcggctctgtaatggtctggggcgcgttcagcaccaagggcaggtccaagctggctgtgttagtggggtggcaggcttcggcacagtatatctatactgtgtcggagtttttgcttccttacgctctacgagtctgattttgtctatcagcaagacaatgcgtcaatccacaagtcacgcgagactatggagtttttcgaagagcaggacgtcaagctgttcagctggccggcccgctcccccgacctcaatcccattgagaacgtgtgggcattgctggcacgcaaagtgtatcccaattgacgtcagtatgctaacgtagctgaacttacgactgccatcttgtctgcttgggatagcattgagcaggccgctctggtgaagctagtcaagtcgatgcctcgccgctgcattgaagtgattgagaagaagggcgctaaaacccattactaatacattcatttcagcacatttgtcttgagtttagtatagtcagggtggtcggaagtttgggccacttggtcaaagtggtttattgtatgggagctacagtacaaaccgcaaaacccaggatgttaacacaaacacccgactactctatacaatacaaaggacatatcaaaagcgcagtgcgagtacttaaaaattgacggggctacggccaaaagtgtgggtgcccggattaatttggccaggagtgtacgatagtgtccttctttggcgcatccgctccccgtacaggctgcacaggggggggggatggcccggaatcgtggtggctcttgtggcgctacttcgcctcccaccgaccgctgcagctccagatccaaattcaaattaacattcctgaagtatttttcgcaccgcgggctgcccagtagccgtgtcgaactctgcaatgcacacattggtcataatgaacgctagatattcgcgtacacaagtatgattgccaagggcgaattgacgtgaatgatctggtattcatacctgtgtaactcgatatttaaaacactcatctggcacttgacatcgttgtatgcatttgtgagatgcgacttacagctatctatccactcgtcaagtccctcttcgctcagacctgctgccacttgagtccagctgtatgagcgctgctgtgttttttgctccatcttctctcgtgatttccaatgcaaaatatgaatggcaggcactagctcacgcaactaccttctaaagatgtttgggtcgacttaactgaaatgagaggcgtgtttgatgagttttcgtcgcgtcgttatgtacgttaagccagctgtctttgcatccgtcatgtcctttatgtgactgctctgcgatttgcgtgattgtccatattccttgtttgtttttgatgtgtgttaatggctcctaccgaccaggcccagctcgcccgttggttcccatatcgaaccacgtggcgaccgccgggcagcgcgaaggcccgtacatctcagttgacatcgacgatccagggctcactctgcatccgcaagaaactggggaccgggttatcaaccgcgtgcgtaagcacgcggtcatctcggtgaacctgctccagataccagtcatcgcgagctagtagctgattgtcaagacagcagtcttcaactacaacgtatttaagtataaactaagatatagcatacaaaaacttgtaataactgtgttagtacatgtcctgtagaactggtggctgcggaggttccacagccacaccaagctcgtaagcctgcaacggccaaatgcaatcgcttttcgtttcctgcctcaactgtccaagtgtcctcttcctcttcctgttcccgctcccgctcacaagtcatgagccctacgcaagcctccacctccgacgaccaacctctcctcaatagtgctaactacatcatctggaagccacgtgtgattgctaccctcgacggcaaacacctcctgggattcgtcatgaaacccaactacgaaggcttgtccgacaccgaagacgacgatgtggtgatggaactgcctgaagaagatgaagatgaagctgaattcaaccccgaccgcgcggagcttgactcggctggttcagccttgcctgatgacgctgccaacgacgtctcaatcggacttcctcaaattctatcctttacggagcagaaggaggaggatgcccgtcgcgccgcgtccaagcgtcgcccgaagcccaacaagcgcgagctgcgccgccgtggggcacgcgccaagatgtacctgtcgagcgtgctcgacaacatccatgtccttttcgtccgtgacaagcgacggcctacgagatctttgccacgattcgtgagcgttatgaggacaagtccctccatggtgacccatactacattcaaagcttcctcatgaagctgaagtacaaggaaggcacggacctgactctcttcttcctgaagctggagcaaaccctccatgcctgctccgtttcgacaaacagtagcctgagcgatgagcaacagtccatctacctctaccttgcaatgcccacatcatggcgcaatgacttgcagatctggaaaggcactcggaagttcatcccgtacgccgaactgagggcaaaaatttcggggcgagctcgcgaagacaaagtacatcatccagaagggatcccccgagagtgctgaaactgctctacaagctgccgaaacggattcccacgtgccgactgccctcgtcgcggcaaacaaccggtgtgactattgttcgcgcgagaactacgtgccgagttcttcagcgcgatctccttgctgggcgagtcaagggcggtaccgttccccccgaaaacttctctgtcaacgtcccgaatcgcggacctaccaactcgcatccacgcggcgcccaccccaattcccgtcccaaaaacggcttccgcaacaacagcaataaccgtggatacaatcgcaacaacaacagtgctgggcgcaagctgcagtttgacgatacggtcgagccgttcgaccgcttcggcaactcggtctccgtcgaccgcgagagcgtcgactttcagcagcgcaaaaacaacaagcaaaccgactatggcatcattgctgtcacgggacccctggttgaacatgtgagcctcgcggcctctgtggctactcccgacctcacctggatcgtggattccggttgcacctgccacattaccgccattaaagaatgattcacctcgctcacgcctagccgtgaatacattacggtcggtggcaaaaccgagattcccgttgagggtacagggtctatccgcctcctcatggaagataccaagggtgccacgcgcaccgtggacctcgccaacgtgctctacgcccccaaactgaagttcaaccttctatctgtccctaacgctgtccgcaacgacttcaagatcgtgtttgacccgaaaaagtgcacgttgtactatgcaaaccgctacaagttctttgctcgcctggcgacctcggcggacctttatcagttcaaggcggtcccggccacgtccacgagccctcagccggctgaagctcatcttgcagctacaggtaagcatgatacatttctactatggcataaaaggcttgatcatcctaacttccgtctcatgcaggatgtgagtaagaccgaagcacttgcggacctcaatcttgctcaggacgacaagacgtacttctgtagctcatgtgtgtaacgccaaatcacatcgcaccccattcagtaaagcccctgttgaacgtgctaaagcccctcttgaaaaggttcatttgatatggccggccccttcccggtccccactttgtctggctgtcactactttgtgacgttcatcgacgactattcacgatacatgtatctctatgctattcgtaataaatccgaattgcacgaatgctatgagcgtttccgacaatgtgctgtcaccctctttcgcaaagacatcgaacacctagagtatcgaactaaccactatgaccctgaaatccaggtcttacagtccgataacgctaaagaatgtgaaaagttgggtcgacatatttcaaagacgtatggaacgcgcgcacaattcacgaatgcatacaccccacaacagaacggggttgctgagcgccgtatgagaaccatttttgaacgcactcgagcatttcttattgatggctcccttccgcaacagctctggagcgaatgcgtcacccatgcttgcaacttaatcaacatgacacccagcacggccacgggaaacaaaacaccacacgaaaaatggtatcagcgcaaaccgtcctcgcagtaccttaaagtattcggttgtagtgcctatgcgcatatcccttctgctcatcgcaacaagctcgaccctcgtgctatccacagcttgcactttgggcttccgcgcaacaaaaacgactatcgcctcatggacatcaagatgagcaggattgtatacagtcgcgatcttgtcttcaaagaggatgagttttccaccttggcatgtattgtaccagctgcggtttctcctactaacgctactaccaccgatcctggtgagttcactctattaccatcccttcgctctgtcgttggtaaccatctacagcaagctcacattagcacagcgtccaaccaccttatacgcccccccagacgaaaatcctgctcgtggcctaccgccgcgcacgaacaaacgggctaacctctctgactccgaactacccatgtttaccttaatgcaccagtcgatctcaacgaagcagaggaacgtctccaacaccagtacgttctcctcgctttgcggcatgtggctgaacctagaacctaccgagaggccctgtgctctgattttgcccatgagtggcgccgtgcagcacaggccgaatgccagtccctcatcgacaacggcacctggaaattggtgccaccaccacgaggccgctcagtcattggttgtcggtgggtatttgtcgttaagtacgacgccactggtcaaattgaccgtttcaaagctagactggtcatcacatcaaagggttccttcagcgctacgggatagactacgacgatatcttctccccggttatccggatggaggttttccgtttgctcctcaccataacggcactactagactacgagatccaccaaatggatgttaaaaccgcctttcttaacgggttcattgacgtagaaatatatatgcgtcaacccgaaggcttcaaagtcccctggaaaggaggatttcgtatgtaagctcgtcaaaagtctgtatggtcttagacaagcccctcgagtgtggtaccatacactgtgcacgttttgggggggatctcggcttctgccgcctcatcaaagaccgctgtgtcttcatgaaaatgttcccgtctggccctgctacatcgccgtgtacgttgacgatttattaatcattgtccttacaccagccctcgtggtacgcatcaaatctgccctcaagcggagctttaagttaccgacctttacccgactgagggtgtggtcttgtgcgtacgcaactgctattattactcccgtcgcagcaaatgtagtgtagcgaaactgtatttgggttgctaaagatactgcgaatactaaaagccccccctgtgattttctcgttatgatgtcaatgtttactcaaattcaatgatataacaactgatagattgctctcacttttgtgcgttcgacagtgtcatctgtttcgcgcgagtcagcgttggattcctccaggttccacatcacttggtcattgacatgaatgcaaggatcgcctgcaccccagtagaatcccaactgctcaatgctggtccaatcaccacattcaccaactcgacgaaggagaatatccagctttacatcgtcaagaatcaaatcgaaattcaaagttgacctgcaatttgttccttatctgcaaagtagctgggagccaagcgcagtttgccttagatgcgttctcagcgaaaggaaacaagcgtctgcagatgacttggcgtaaacttgccgaaggctcagtctttcctcgaagagtcactcctcttttacagaggtcactcttctgtacccaaagtctttttttctgccccatttgcaccaccatgcgctaccaccgtaggttttgggccttcggcgccgataacaacgatgatttggtgccagtcacggcggctaacttctctcgtgtgcgtcatatagaatctaacccttgtaagcatcatgcgaccagaggttaggataactcaaagtattgtattactcagtaatacaatttcggtattaatacagattgtattaatacttatactcgttttttgggcgaatgtataaggataattgaagtaatactactcctcggaattggtaataccagtaatattttacggttatacttccagaagcccctccgaacccacgcaggcgctatttcagtgcattctcgcgcacttccactctctatacgtcctccgcggtgctattcgatacccgtcggacagcgtgacccgcgcgaggcaccgtgccaacgtctaccacgaccttaacagaaacttcatctattgtgaaaaccgattagaatgtcttattggattgttaatccgccgatttagtggcttaataagacctacgaccccccatttgttaaatcagacctcctaattagactggggtacctcgatttatactcaagattattacctaggacgacttacagagtcagagcatatgagtcggatttacatttggtaatcgaccgattaagccagggccggccgatttgcttgctattcagatggaatgtccgatgtgcaaccggcattcgctccttgtaggctaaatcagccgccacgcaacaatcgttgcagtcgctcttgactaggtagtcaaggctacaacactaacatcagaactaagcaggaaaagccgcacgctataatacatgtaactgagatatgcaggcgacgcgtttaagcgcggtgttgccgctgcacttggcgagtctcgggctgaggtaaatgcatgttgatcgaaattgctaggctgcacataattacgaggccgatgaccgatttatactccgattataattgatacatccccgatttattagccgtcaaatccgctatgagcgatgtttaatcgactaattcagcaggacaaactaatcggttttcacaataaatgcaaaggggaagtttgcgttcgatcactaaaccaagctaccgacatacttcccaactacccacaaaaatatttccctgcctgtgataattaagaccagtgccgcgggactaccactacatagccacatcttcaggtcgcgctacgcttgtcttggctgcctctgcaacataaggaccgtcgtatgaatactacgaagaaggtcttcaatgccattcggatcgtcaaggtgattggatcgcttcagcgttgaactgttctatgggctcagtatagactcgccactggcgaagccgagctaatgtgggccacataaagttgtacaagcataaagtattacccagagtattaatacaatctgtattaatactgatacttgttttctatacgaaagtattgtataaccgatatttataccagacctccagcagggccagtaataccaataccatgatttggtcaattatcctaacctctgcatgcgactgtcaaatgactgtgcaatcgaactgttaggaaacccctggaggcgtcgggcatcgagtagcgatgtctccagtttgtcagcatccccagcctgcagtcactggccaacgctcccaagactcttcagctgaaaatgttctccagctttgccttctctcttggagtcagcagggcatccaacagcttacgattcgtgtggacgatcagctccgcaatatcgaagtagcggtccagaatccggtacgtactgctccagcgagtggtactagacacgggtattattgcccccctcctcgcttcacgtagcgcttggcgagtcttaagcgtgttgatcttgaggccgtgtacttttgtatcacaaactggttgtcgttgggttcaagaaggccttgagccactagctggtggtggtgaccggcacagccaaacataggtacatcggttctggatgcaagtgcaccgttcacggaagcatggtggcagacatagaacaccagcaggtctacgctatgtccaaagcgtattccaacagatcaatgaatgagtccgcgcccaggtcgccttcgtcggcaaacggggagaatacgagcaagtatttctccctgacgcttctgtcactccgtaacgggaaaaacagtgactaggacagcgcagtgagtaccagactccttccgcgtgtcgatcgaaaaatcctaaacgtttgccaataagtcaggcacgggtacgatcttgcgcagcgggctcggtgtcgacgcagcttggcccttgcgaggagaccaagcagcgtgtactccgggctccgcttctctcgcagaacgatagctcgtggtgctccatcacgatccagtccatcacccggcagctgtccatgatggcaggggtcgcgatgacccggatgaaagcattgagagtgttcgggcggccgaccaggacgttgtactcgcccatgtacacgcggtcatggtggcgctaccagtggcgtagaatggttgtgtagctgtcgttccgcagcttcaagcggctcccaggacacagccgacgatggtagcggtcacctcgatcttcaaatagtattcacatagctggtgcgtcgttggataaggcccggattcttcgttcggttgataggagcggcgagggctcggtagagaggctggttgggcttgaagggagcacagaaaataacagaacgaagaaaatcgttaatgcagcgcgcttctggcgctggatacgtcggcctggttgattctgacgtgagaacgagataccgcctgcacctaaagcttacagacaggaagctaggatgacaattcaagacgcattgctcggtaacgggacacggcaaaatggatctttatttgaacgtgattgcggcttcgaacgaacaacaattttgtgtgttttaactggaaaaattgtcagacatcttgtttatcgagtaacccatgtagcacgtcatagtattagagatgccaagattacagctgccattatggcctcagcagcgttcttggcctttcgcagcaaagtcatcgacattaccaacgaggtggtaccgcaccttaacgttagtcccacttcatttctgctgtacgatgacaacgacgagcgggatgacgctgttgtagagatgaaccaagcagtaacaatgaggacgatagcgaagcatcggcgtgtagcacgagtccgaccatcgcagcgatgtacgtctataagaccgccgcaccacaagttactacaggctccattctgtacgtgtcctggttgggggaggcaaaagatgaaaatacggggcgccaaccaccaccccgctctcgctgtctacggtgtgaggagactcttcaaatccaagcacgcggtcgttggtgaactcattgccagttgcgatcttcagttcaggtgatatacaagcgcgcgacataccgctacaatgtgcgcagcaaggaaaccgaggtgtctgtggagggcgacgtggccgtggagtttcggggactccaaaacgttgacgtaaaaattcctacgctaggactccggaagagtcaaagaagaagcgactgcgcactgcaatgaagtagttgtttgaagacgaccgtgtgcacttctgtatcggcatacatgtatcgatgtgttttctacatctgcaaaagtgtgaatcacaccgcatctccggcgcaacactggacataagtcttgaacttgtcattctaaccctaaacaggatactacactcagaagtctcccaaatcactcggacgattccatccaggcgacatcatcgtcgtcgctggagatggcggatatgcgcggaagtgaccacgccgctgtcctggcacgaacgacccactaaatatacgatttgccgccgccgtcatcgacgacggagcatgattatcgtgtttgttgtagcatcaccagcagcggtaggaggcgctatgtggtccatcaggtacgccagcaaagggtcggacccagggtttgaagctgctgctaccccttttttctacgatgcagcgaatttgtctagatctgctaaaaaagccatatattttaaaatgatagtttaacgaaagagcgcatttcaactcgaacaccgccaacaccagcaaggctattcttcgtgcaaaacaaaatcccccttctccactattcagcagcagggcccgggttcaagaatgtggtccgattggacgggcactcgctttgagtcttgttcgatcaagtcagttgagagagcgaatctttgtcgcgcaggggttggccacgttgagatgggactgttcaatcacaatgttcacaactccattgtagcatcacagatcgtcacttgtatcggttcaacgaagttaatagtaaacagaagtcgattcttctgcagctcagggggggggcttctaagaagcaaatgactgataggcgataagatgtaacaccagaaaacacagcacgccgatggacacgttgtgcgatgtttagcccaccgtaataatagatcctatgtttgacttgaattaagtattgtttcgtacaaaatctggagcaaaatgggtgctaccgtaccagtacatcacgcgcaccactcctgctgacgtaattactacatgagcgataaggatttgatcaggagcagacttaaagcccttgaactcgcttgccaacgcttttgcggagggtagtttgaaacaataacgttatgattgactatacgatttaattttattaacgatttgtgcttattgatatagaatgttccccgccaaaaccgcaaattgctacaacgtgccaggtgtttgcgctaaacctttaggagttctgcaataacacaagctttctacaaagccgacgaggtttgtatcgacttcgacatgcctcccaaaaagatgttaaccggggtcggacctgtccggactatacgaaggcaagtgcacctcgtctgcctcgttcagcagattgcgtcgcccctgtttagtagtcgatcagatacgtagtcttatcacgcagctcgatggtctagtactggtggaccaccacgtcctcggcgtcctcgtttaattggacatccaccctgctggtttgcagcacatacatacaaactaagacaggaacatcagaaatagcactatctgaattaaacaaatgccgcatcaatactgcaaactacgcagaatggcggcgtatgttgtgacatccggagacgatgtcacgaatagcgcggcaagccaattccgaaggtccgaagttggctgagagctcggtgccgtgccaaccatgaagtggtctccaaatttcgcagtctgtgatttcgagcaggtgcttcatttaggcgtgtgaaaatagcttgagagcgcctacacaggcggatctctattccactggaagcaagtaactcaccgaaaaaaatgagcagaacaaaggacgaaatagagctggtaataactattgctatgacaaacaactctttgaaagcttacaacagaatccctagctgacacttttggcggtgcccacttgagcttgctggagtccgtacaagtgctgaaagaagaacaagttttatcctgatcagttgtcacccatagcgcgtatgcagttcacgcttgacgtacatgcccatttggttgagggtggctttaaccccaacattttttgtccttgaatcaaggaccaaaattcgcttaagtacgctacgattttggcgttttgtcctagaaccagcaaaaaggaccaaaagtgacttggcgtttgtatgggaggggataagatccggataagtacgggtgtgtcatgtataccaagtataatgcctgttcgcgaggcgtaacggccgaaaccacatactggacgcaagttattctctgatatttgtcagttattctctgatatttgtcctagaatcaaggacaaaacagaaaacgcaatatgttattaatgacactttgtttatagtcttttaggcatgatggacgatggtggacagtttgcgagacacacactttaaagaggtaatccagggctttcttccataggaattagatagtgtatctcatagaactccggtcaaggttagcttcaatttattggttcttttgtccttgatttggaggctgttggggttaaggggcagtcgcaggcttaggcataaccaggtgtagtattgaaccgctgttgtatgcatcatattgccttatccattgtcccggagcgaatgaagctaaaacgactatcaattcaccaccttatagaatttaatgctgagcttgtatcagtttgaatggcaagaacgatttgggcaatgagctggctttcgtgcgaaatccaatcttatcaacgcttctatgtagttttacgactggccaaatctaaaacaggtttacgacttcgttttaggacatgccctatctgaggttatttgaagcagcgaccatagtcaacaatgcctcaaactaagtcttgaccaatttattatttctatgtctatcctacagcacaataacccccactttggcaagaagtacgcgatcctagtaaccggcatgacgtactacagctacaccaagttttgcgccggttgtgtcccgcgccttgctgtcaagaagagtggcctcatcaataagaagaacagccacttggttaaccacgtagtgttgatggatgtcgtacagcccgtaaggccatacccctggtattacaagcgcggaccccaaggagctgatgtacctctaacagtgctttggcaccggattacgataagctcggccacttggctagagagggtgctaccgggcgccagttgttgcacccgcatgacaacctacagcccggctttcgaatggagcgcatttgtaccacaaagaaggtcatgacgtggctaagcaaaaacaacttcttcccggtccgagcgatgccctgcatgtacacccttgtgttgtcgctgtacggtgggaggtttggcagcaggcagcagagtggtacgggattagaaacacatcagtgtgagcgggagcgggaacaggaagagggagagggagaggacacttggacagttgaggcaggaaacgaaaagcgattgcatttggccgttgcaggcttacgagcttggtgtggctgtggaacctccgcagccaccagttctacaggacatgtactaacaaagttattacaagtttgtgtatgctatatcttagtttttacgtaaatacgttgtagttgaagaccgctgtcttgacaccctccctcagtctgaaatattctaaccgataggttgagcccaaaatattttaaggtttgaaaggagatccgcgtcccaactttctcagctgggagaagccctccctgcttcgggactccgctcattcttctgtttcaagcctcgcgcgtacgaggcagacgcacgaggtatcgtgccaggactcacattctcacagagcgtagtgcctgctgcagcttgcttggctactttgttggatactccgactcatccgagggctgctattttagcagaaggactaccagcgtggcctacatagtgagctgcagtatgcgcacgtgtgcagctgtctgccacaaccagagtgatatgccggagtgctattcgttctgcggactgtttgcggtgaataattgtatgcagattcgagactacatcgacgaaggggacatgcgatacgtggtgtgcaagctacgcctgtcgaaagaaaaccggaataccacggcaactggctaactgggggggtattctattaatgccctccattatgccctccggcttaagcagtacgacatgctgaatttatcccggcccacaaaggagcttcacttgcctcagcgttacctctacaaagcgattgcagaatcgccgcgtcgccgactgttcattgtcggcagacctcctggacaagaacacgcaaaatttcttcagcttcagcttgacaccatcgaaaagtaacattatcacaagaggtgaaactgtatgcacggcaaaatcccaagccttactcttcacgacctcatactatttaaatgcagtgcgcggttgtgcagacatccagaatcttatacatgagtagtacgtacttaagctgtcatcttttcaagactttgagtattatcctattggtattctcttcagctctactcaaatcagttgagcttcagcagaacgtggtcggtccttgagtcgttgcaacgttactgctgatataactagacttatcaaacacgactggtaacactctacacagtgtgctcagttgtgtgacatgcaggtattcttgggacccaaatgaagtaacttggccaatattaagttcatttacatcaaatccagagtatgatagggctccttaggcgccgcaacatttttagcatttctaaatctgcaagctaagaactttgtagagactctacaaacccaaatatccccaggggaaattcggtctatcccgtcattactcaatacaatccaaccttcctaattataacccgtcattcatcattataagagcatcttcagcggcggggccttattctgaggtatagtggggtctttgttaccacatttttgtagttgagacctgagcagaccgacttattcccatccctgagttctaaagcgagccttataagtgcgttccacgctttgaaattgcattaagttttgttgcaacctttcgacccttcagttttgtatgggtggaattacgattggggtcttatatttaagactcaaaaaccaatctataagttactgtgaagctaaaacttgcaataagacctgccgcggggagccttaagtttcggctaaatcgtaaaagcctttgttttaccgtttgagaccagcaatgctggagatgctcttgttcccagaacaacccgatattcatctttgttactcaaccttccccataatagcttgataatgttagcttggttatgtaataaaaacaaagccaatcaatcatttcttacgtcggcaaccatacagtttcccatccatccattcacttagtttatccttctgagtctaattcgtcccagctagtaccgggtcttagtcgctatgtagttcttggagtattaagctccctgaaaactctagcaaacttccaatacaggtccaccgtccatttccgaagcttggccttgatctcaccgacgggcttctgcgcacacgctagtttgcgctatgtcgaagcagttagcgactaaaattgctgctgggatgtgttagactcggaggaatattctttagaggcaaatcggcatggtccagacggaggtggcctcaaaccgaccgatagaccagtacgcctaggtccactgcgattccttcgccttgatcgtgaattcatggatttggaggcgatatttacgcagttaggtggttgtatggagctggcatcaggcctcccgattatggcatgctattttcaatactacccagatcaaccatggccctcgccacgcgccacgccaccttcaccccggcggaggggggtcctacttccgtccgtgtcgcggcgacatggacgatacaatctcggagtactttcactgtcatggtgcggacacagacccgtcgcaatggctgcacgaacctcatgcaatacgtgcgtcgggagcacccggactacgagtctatgatgctggctgctcctacagctgagactagctcaatcatgaactacgttcgccgctcagctcagaccgtgtaggactggcctgactggatcgtcaagaacgacctatcgatgcatttctgcgagaaccaagctgcaaagcgacaagtaatacatgattgcttctaactacgatacctacttttagtgtgatgtcctgtagattccaatttggactacgcgccatggaaggcctcactcggattgtggagcgcttcattgccgccgagatgcccgcacgattggactcaccttcgacggctggagccacgcgtcggagcaatttgtcgaatgtcttcgcttgctacgaggtggacggcgtcacgaagacccccctgctgcccccccccccccccctactccttgtgattcttttaatcacagtttaattttcttaaggccgtgttcgacttgcaccccatccagttgctttaggctacatacagccgaattttcttaattcagctcatttgcaatttgaaacacccaacacgtgatccagctcaatatgctcaaaagatctggatttgaaattcgggcctaggctgaatcgggctggatacacctgcctttttatagtctctcaaactaacaatttgtccgaaaccaatcccttttgaaccgagcttgaatgtggtataattttgtgcaggctggagaccacgcttacgtgattcgccaagacacatgatggagctcggaagttttcaatggtgaaccgctattttcgaatcctggagcacctcgccacgacggacgatgccctggtgggcatccccccggcgccggcaagcaacaagcagcttcgggggctgctcaaaggcctgaagaagatcgagtccgtgatcaaggtcctccaaggcaagggcgagagtttgctggatgtgcacgtgtggttcgacggcttaatcccaattatgagacagtacgtcacgtatctcggtatgtttttttttattgtttgcatgataatcgtcattgggctctaaacaaatttattgcatgtaacagggccccgcgccgacattgtgcacagacctgactttgagtcgggctgcgttcgggtcctggaagggaagacgagccgccccacgcgaggcgagaaagctgccttgcacccgttccgctgcgaggatgcgagcgaccgacctaatggccaagacgcagagagcggtgataagggctcattcgtagatcggctccaaaagcgacaccgcttagcagcggtggagcctagatacgagctgctgggggaacccttcctacgtctaacgtagctgagcgtttttttaacgtcgccggaacagcgtacgaccatgcgcggcacagccttcagctggtcacgctggagatgcagctcttccttcgacaaaacgtgcagaattgttcggtccaaacgatagatgtagccacaagataaaagggtattaagctgttctcttatgtatgtgttggtagttgataatgatattatttaccgacgctagagaagcaatttatgttgtgaaggtggacaaatagcagtatcataatcgggaggcctggctgtcctcacgaaaacatctgtcggagtaaatgagcgctcgtgcttccaatggtgccatccgattataacccaacaagtgttgccgccagtggtagtggggtacaaccaaatcgaattgatgacatatagtatgtagtcttttcagtgctctaaggagtccatactaatattatttactgatgggtcggaacctgtccaaaatagagaccgcttgtctcgcaagagagctgactgcgccgtttcggcgcctgttacttggttaaagcgacccttcacgctcagaatgctttcgacgcgctttttgcgaacaatcacagatttactgaaccgatactatgttgaaatgcagagtgacccctgagtatgcattttatgataaatgtattatcggcacaaggtgtcggagtagtgggaaattacattttccgcttttctggatgattagaacagtttgtggtcatttaacgggactcagaattccagactaccaaacactggttaggtccaaaagatcggcatttatatctacgctacttattgtaatataaatatctatggaaggacccaagcaagacatttaggccgtggtcacgttagagcaacaaggagtacattttcttcccgcactttgcgctccgtaagcctggccgtaacccctctgtcaccgcgttcacgtgcccaacagtctcgcagctcccatccgggccaacttcatcactcgaactgtcgttttcctcctggtacgtcgatcccgcgctaccgacacttggtaggcccttcattacccccccccccccaggtgttccagctgattcactatgttcacttgtaaccacagtagttacatcaatacaaatattgtatcacctataaaaaatatttatacgggatcagcacaattagaacttgttgtatgctgcactgctaaagtagtcgcaggcgtttagttgctatagggcaaccgcaaagatggcaacttagagaagaaatcctggtaagtgcacttgatgcgtaacacatccacctctaccgtcacgtgaaagctatcaaagttgctctataattgcttgcactataagattactggttacacaacgaagttacaacgtgtaatctggtgaaacccttctaatcgtttcgatacaatgtgatatacaaaggtttggactaaaaggtgaagacatatcggccttactggcggcatgcgccaactttgagcccgggttgctcggccggtatatagaactagacaacgtagccaccttcattttaaggccgtgtttgttgaggaggcaatacgtattatctcggacatactacatattatcccaacgaacgtatcgcttcataatacgtatcgtctcagaactagtgcttttcaaaataaccagactaatcatgaaaatctcgtcgattaaatctaataccagcaatcatcattaaaatcctgcagtagctcagtatcgggcaagaaagcagcagtaagcactttaaatatttgctactgaaatatagatatcacgtagtttaagtgcggttacggaaatattggtgaattagcgaactttgttctgactacccccccccccccccccccccccccgacgagaaaacatctggtattttttcggagtccgttaaagcgtagaggataagtgggccaataattgactacatcggatgcaagaagcttcgggagccgaacttgattttggctctcggtacgaacatttacacagacatcaagtgcatggtcgaccaagcttaagagaaaagcagcggttctgatgagttagattggtcgtcctacgagtacgaaattatgccgatttctagtgataataactaataaatagagctttgcggcgcctggtgagccgctacaactgggctccgcaattttttttaccatatcaactctcgcataatacccaattctcctttccagtataggcaagctcgtcttcagctatgagcgcgcgcttgtactataagatgtattaatcgttatgtcataaatttgtattaccccaatacgtccaaaccagcgagatagagaaacaatgaatatttataagtacgaagacgtaaatcgcggacgatgtcttgcgcgtgacaaggtgttagtatgccatattgcttgtaggcttatgagttatggcgagtaatcaaaaaatagtaaacagaaaatgatgcgcagttaagaaaagcgcaagtgagatgtgataagctttctcggcagaagcagtaccaaactgcgggttaagtccggtagatctggctggaatgacagtgtcagttttcctgggagaccagcttgctggtttaccagcctcacaaactttaattcgtcacgcaatgtattgtggtgtagtaccccgcggaagaagtgggcgcgccgggcgccggaggaagaaggcgccgggacgcgagtgatggacttcgacgcggctgctggaacgcgacgcggattgatgagcgcgacgcagggccgagctcgacgggaaagtcggtgtgggtgatgggccgtgagacacggtgccagaatccagtgcgacgcgtaatcatccgacgggtcgaccagcgcacccggttctgcaaaacgcgccgaccctaaaccccgccgagcaaaacgcgccgaccctaacccccgccgaccaaaacgcgccgaggtaagatcttgattgcgccacgcaaaccaggttgaaggacggcagtgcaagcacgacaaaagtagggataggcccagagcggtaggcttagcaagcagtagtacagagtagccagtagcaaggacataggatagggtaaggactcagtcccgaaatttctctgaaccacaaagacctcccgtcttctccgaggttccaggggaccaccaagcgccggcaagtagagccgcctcgatatcgcggccccccgtcgtttgctggttcgggtgctcaccccccacagacccgtgctggaacaaaggcacgttaaacgtataccgtttaggtgggcgcccgataacgcgctgcctaggcgaaggaccgcactggcctgataaccgccgtgcactagaccccccgtgtaggcccgataacgccacacaagccccaggaaacgccggcccgataacgccgcacgcccgacgggaacgccgaggaaacgtcggcccgataacgccacacgcccaaggctcgacgccctacgacaaggaacaagcgtcaacacaagaaccccccccccccaactccgaagcctgcgaagacttgggcctgtatttcgaagatacgctactccaacaaccgggaataattcgctcggcgcgaccgctatccagacgcgccgagtttgtgcgagatcgcattcgcgagatttctgcgagggcgctaatccacaatggtgccgtgacccgggagtactacttcgaatgacgggctaacgatccaagaggcatcgaaggcaggtgcgcagtcggcgggaaggtcgccgaccgcaagagagtacattgagagacctgtcgcgtcgtggagctctgagggaaccttcacgacaggccacggggccagcgacgaccaggagggctacgaagaacagtttgccgttcccgatgcggctcccgacgagggagccgcgaagggccgcgacgcaagtcgcggtcctactggtcggaagcctgcaaaggccgacgaccaacaacaacccaccgccaagccagccacgaagcgcaagccgcccaagaggaagaaaaagaagctgcgcgcgccggactcggcggaggagtcgctgtccaagccgcaaggcaaggacacgggacgtcagtacaccgtcgaggaggtacggtacgttgtggcgcgcacggagctcttccgtctgctagaacaagacccaatcttggtcttcctcaagcccatgctgatgagcaactttacaggccccttcgtggcgccggacttcaatagtctcaccagcgttgcccacgccgcgccgactctcttccggatgctacgtgactcggggttcgtgctgggggctatcgagatggagaggctgtgcgattgggacctcaaatcttggttacgtgcgattcgcgtcgtgcaggagcccttgacgattctcgccggatccgtcaaacaagacgcgacgagttccgcgacgggccaagacgcgccgagcccctcggcgggtccagcccagacttcgacgaccacgccctcgcctccacctcgataccaatcgagcgtggactccgacagcagtttcgagtcgcccaagtgcatgcccatgaaccggccgccgcgcgtcatgcagctatccgcggcgcccacacgcacagaggtgacgaaacccgccgaggaggtgcttcccaaggccttgagagaatctatcatcaagctgatgcagacgacagtgattaacaccccgcgcgccgacacggccgcaattccgacggggccgaagccgcccgcgaatcccacacccacggtagcttgcccccaggaggcagcggatgtcgccatggagtcggtcagttcgcgttcttcgacgaggtccagaactcgacgcgacgcggatgaggaccccgctgttcgacttggacatcggagtgccaagaaccacggccgccgtctcgacggcgacagccagcggcgtagccctcgcccgcgtacgcctctcagcatcttccgagctgaaagcgttctcgggacgggacgccagcgaagagaaagccagactgtggctcaaccgtctgaagtccgccgcgcggcgcgacgggatgacgggcgaagaagtgtccgggcagttcagcgatctaatgagcggccctgcgcgccaatggtatctccagttgcccaggaaggtcaagaaatcatggaccgagctgatggagcaattccgggtgcagtactgcggcaagggcgtgtcaatggccagtcgctactaccatgcggctcagcgccccgacgagacccctctggatcacttgtaccggctcaacgtcgcgggcttaaggaccaacatctcatacgccgagggcacgactgaagagaagcgggaacacgtcgagcatttcatccggacgctgaacacggaggccgaactcgcctcgcgtctcacgctgatggaggtcgccgactccgaggcgctggagaagaagctgcgtacccgacaacgtggattggctcaccagaaaaagactctcttcggctcgaacaagttccgccaaaaggcgccgaccccgccgactcagccggcgcgcgccgtgcatgcgattcacgtcgcgtcggacgagtacgactcggaacgcgaaagtcgcgacagcgacgatcgccagtacgaccaagacgaggcggacgaagaacgcgccaagttgttcgtcgcgggacaggccccgccgggagagccggcgcgtcgcaacttcgatcccgacgactcgggacgcgaccgcccgcggtgccgccactgtggttcacgtcgccatgtcgaaggagactgctggaagttgttgacgtgtcagaagtgtggtggccagcacccgacggagcgatgcttgagggtgtgcaaggcctgcggtgacgtgcacgaagccggagaatgctcgatggaggagttcttcaaccaattgtgccagtggtttgacccgaataaacacgcgggaatgctgccgccggccgccgagaagatgttaaactaggacgctcgctggcttggaaaccagtacgagacgagcgacctgtttccgtcgatgcatatgtgaccaagaagtcgcgagaggtggttagtgagatcccgacttccctgaatgataatatatgtgaattcaacccggaacgtaccacgcaagaacgcgcgccgcgaatctcggcggtccgacgtacgacggacgacgagtttgcacgtgaaccacccctggacgacattgacttgcaaccaggagagcgacgcggatactggaaacattacgcgccgcacaagtggtacaagcaggccaagattcatggaaagctgaacaaccgccgtgctgtgttattgctcgacacaggtgccgaggtgtccatcctggacaccacctttgctcatgaggtaggctgcctgattgacacggagatcacgcaagagtgtgtgggaattcgtgatgagacatattacacggtggggagaaccagagtcaagattaccttagctgggaacttggtgtactacatgcacctgtgggtcggcgacttggtcggccaacacgcaatcctgggaatgaacttcatggtgcccgctggagtgcgcatcgacactgcggacggcacggcgtgcctccccgacgaggtgcatatccagatgatcggacgaagaccgctatacggcgcacggatgcactcggtcaacgtcaagacgcctgtgaggctcgaaccaggagacacgcatgaagtcttgctgaggccggatcgaaacgcgccgttcctgtgggtgacacgggcagagtcgtgggtgactacctttgtcaaggggagagtcggaaagaaaacgtacctgcgtgtcacgaacatcggagacgcagcgataaccctcgacgcgcatgaaacgcttgggtggtggacgccgtctgacggccagcctcggaaccgtggattcgtccgactgggctccacccggtaccagcagtggcagaatctggcgtacggcacgacgcgcgacgcggaggagaactggatcccagccgagctcgacggaccgatgacggatcgcccctcatacccgacgcctaaagccatcttgcgaccggagccgagacaactcgggacgcgacgcgccgtgaccccagtgttggcggctgtcgcggaagcgccgaagggaagagggatagacttgccacccgacgaccacaagccggatacgggcgaggaggcggtggaaagcgaacccgatatgcctccgactgtggctggaagcgctgcgatggaagaatcgccggagtcggaactcgccgagccaaaactcgacggaccaaaccccgccgagccgctggaggcggtgctcgaggacgaggcgcgggacgacgaggaagcggacgagtcgtcgccactggagtcgcccgaatcgctcggaccagggcctggtccagctccggctgccgcacggcccctcggcgaggagtgcgtcggctgtgcaggagaagagtgacgcgaggccgccgaccccgccgagtgcgccgaccccgccgcgtgcgccgaacgcgttgagccggccgaaggcgtcgacgccaaggagggcgagcgagaacgcgagcgcgagcgtggaggcgagtgcaaacgcgaacgagaggccgagcgtgaacgcgaacgcgaagcagaacgggagcgcgggggtgtccaggaacgtgacggcgaacgtggaagcggacgcgccggcgaacgtggaagcggacgcgccggcgaccgtgacggcgaacgaggaggcggacgcgccggcgaccgtgagcgagacccggggctatgcagccggcggcgcttggactgagctcgccgcgtctggtcctcgctgtccgaagactcggagccgaagagcgacgcgtcctctcgtgcgcgcgctgcagcggccgcagagggcgtagctgcagatgaggcctgcgcagcggcgttttcggaagccgcagtgtcggccacggtagagggccgccgactacgtcgaaggggcgaagaaccagacgacgtagcggacgccactcctgacggcctaggcgcgcgtgactgagaacccgaacgactcgacgcgccgtgtcgaggtcgccgaaaacccgacgaggacgaggcagcggacgaagtcggaacaggacgggagcccgaaggacctgctggagggcaagcgccagtcgtcgagcctgccgtcgaagccgacgagcccgcccgggtaccagagctcgacgcagttgaagcaggaacaggaaccgcggatgccgcaggaactgctgcggacgtaggaatagcaggggggagggggatcgcatcgtcgatctccgccgtgaaagtggctttgagtcgcctgaccaggtcagcggtgtcgatctacccgcctacacgcgttacgacgccggcgagacgatcggcaagctcgtcgcgcacccgccgcgccagctctcggccccgacgcgcgtctcgaagcatccgacgccaagccacagcgcgttcgtcgcgctctcggatggccaagttgcgctcctcctccagctcggcgacgcgagcgctgagacgatgggtctgggcgccgaccgctcctcgacgctgctgagacgaccgccgaatggacagccacccagctcgatactgcgccgcgcgagatgtggcgcaaagttcgccggcttgagcccgcgccatctcggactcggcggccacacggagagtcgtagcagtagccactgactcctccagctcgtggatacgcgtcgcgccgcggcggagctcctcggcgtgggccactaagagcgcgttgacgcgccgaaggtcgttctgcagcgggacgttcaggttctgggccgcctcgatttccatgcggctctgagaaagcgacacacgggccgcgcggagctcttcgtcgaccggggcgcgctgctgctccagagcggtcaaggcctgacgagcctgatctctctcggtgacggcagcgtctcgccgctgctcaagggcggccacggcttgacgtgcctggtccctctcggtgacagcagcgtctcgctcgcgtctcagggccgtggaggctcgacgcacttgatcccgcatgtcgagggccccgtcacggtcttgctcgacgaccacgagaacgcgggtcacacggtcacgctcagcgagagcggcgtcgcgctgctgctcggcagtggccacgagctgccgcatgtgatctcgttcagcttcggcagcggccacgcgcgcttggacaggagcgagggcggcttgggcggctgcgaggtcgacgcgaaggtcgtcacgctcggcgcgcgcgtcgttgcgctcgccttgtgcagcaaacagccgcgctagcagcacggtggagggaggcggcgtagcaggagcgcggaagtcggccactcggtcctccaggacggcgtagtcccgctcggcctgctcccaggagaggagcgcctgctcgagccggatcatgcctgcgcgataaccctcgcgagcacgatgcaagatcgcgagattgcggtcatgcagcacggacgcgtgagtagccaagcccgcattgtgcgctgagacgagttcgtactgggcgcgcagctcctggttctcgcgctggagagtgtgcgcgtcggcgacaagagcagtcaccgagtggacgggggcgcctgaagccggaagctggacttggggcgcgacggggaggcgaggacgatgcgcgccgagggcacaaaccgcgcagccagctcgttggtgtcaagctcttcttcctccaggtcgatgtcgttgacgtcgacgtcgtggcggcgagccatgaagcttggagtaccgcgaagcggactgcgagggcagaaaacgcgatggtgtcgagacgaagccaaggcgcggggcaggttctgcgacgacacacccacctggggagtgcgcgtgcgtggcagcgggacgaatgtggtgtagtaccccgcggaagaagtgggcgcgccgggcgccggaggaagaaggcgccgggacgcgagtgatggacttcgacgcggctgatggatcgcgacgcggattgatgggcgcgacgcagggccgagctcgacgggaaagtcggtgtgggtgatgggccgtgagacacggtgccagaatccagtgcgacgcgtaatcatccgacgggtcgaccagcgcacccggttctgcaaaacgcgccgaccctaaaccccgccgagcaaaacgcgccgaccctaacccccgccgaccaaaacgcgccgaggtaagatcttgattgcgccacgcaaaccaggttgaaggacggcagtgcaagcacgacaaaagtagggataggcccagagcggtaggcttagcaagcagtagtacagagtagccagtagcaaggacataggatagggtaaggactcagtcccgaaatttctctgaaccacaaagacctcccgtcttctccgaggttccaggggaaccaccaagcgccggcaagtagagccgcctcgatatcgcggccccccgtcgtttgctggttcgggtgctcaccccccacagacccgtgctggaacaaaggcacgttaaacgtataccgtttaggtgggcgcccgataacgcgctgcctaggcgaaggaccgcactggcctgataaccgccgtgcactagaccccccgtgtaggcccgataacgccacacaagccccaggaaacgccggcccgataacgccgcacgcccgacgggaacgccgaggaaacgtcggcccgataacgccgcacgcccaaggctcgacgccctacgacaaggaacaagcgtcaacacaagaacccccccccccccaactccgaagcctgcgaagacttgggcctgtatttcgaagatacgctactccaacaaccgggaataattcgctcggcgcgaccgctatccagacgcgccgagtttgtgcgagatcgcattcgcgagatttctgcgagggcgctactccacagtattcccagttacaggtaacgttccggagacatcgaaatcgcaattagcgagtttgcaaaaaatatctgaagagcgaaaaacgtttttggaagctctaagaggtttcgggaggaaggaaatactaaccagaaggctatgtccagttcgtagttcagagggccaggttctttttgcctggcacgttctctactggcagcaacttagggacaatagaccatcttccctctctcagtggcaagtcagcagtgcaaggagatgcaaggccagtggtaaaacatgtgttgattgaatcaatacaaaaacaattcatgcgcagaagcccagtagatctctgctcctagcgcgtcaacacgaaaatcaccaaactgacgaaggcgcccgttcaccagctttgcgtgcccacctcatggcgaaccttaagctcagttaatttccgctcgcaatgcccttcacctcacggtgacactttcggacgcttgctcttacccacctttaagctcccgcgctcacgctttttcggcttcttgctcggagtgccaggatcatctgcggcgatggggcttggtgtcgcttgcggagaatggctgcgcaaggttgcgggctccacgtttccaattgaacctctgagcgagtgctccagcgctgcaccagtagcaacttgcagttgctggggagaggtggactgctttttttcgtctgcagtcatggtagacttgttccccttatcatcgtcatcggcggaaatattgggcggtgtggtgtaccatcgtactagctcgaaacaggcagggattgctgaatcaaccaaaaccaatgtcttcacactcgtggctacgcggcagtctccgtagataacaaccttagagttctcgagcgacagcactctctccagttgttccgacgagaccttgtcaacttctgcttgccacagtgtgcattcaacttcagtatcgctcatgtcttgcagagccaccttgcgtttgcgtagaattctcccgtccttcgctgtcacgtcgtccggcttatcaacacgcacaatgacgctgacagatgtgccatttggttgcgatgttacgtccttcagtgaagtaaacttgcaatccactaggctgataggaacactgaactcgcctcgagtatcgtcgaaccactcctgcagagtgatcacgtcaggtaagttgggattcgggacgaccattgtgtacgacagcgtagacagcgaccgaccccgaaattcattcaccatcacttgccggaacgcgtacggctggtgcaaagccgctgtgtagtctacctctgcaaacttattccacagagtgcaaacaatctccacgttcgacgaatctgtcagctttagctctcgcttgacttgaaccccatctttgcggtcaacaactttatccagaacaccgacgtccataatcattgcgaggatgtcaacttgtgcgtgcgcatcagcatgagcgaggtcgctaatagttgtgaaagcgtagtccacgtgctcgatggaatcatcatcttcaaccggagtcacgctagctgaagaagacaagcctatttcgtacgtgtggttcggcttgccaaatccacgcgcagcttttctgattcttccaccagcgaacaagaagacgccgtcaccacgcaagattgtagccaaattcttggtgtcattgttaaatgcgcaggcacaaattgactgccctctgcgtcaacaagctctgcattcatcacgtggcctcttccgtttgcattcgaccactgccggactggagacagaaacgcgatgcgtgcaacaacttcccattgcacgcccagcactggagaaagatcgcgaatagggtggcgtgacattgttcaagcgcaatagtcgaagtgagtcctcgcactcaaatgagagagtctcgacaccgttacgaagagtccgacgtgagccctttcgcacaatgcacatactcaaacatttgtcaaaatacagtacgaattagtaatttggtcaacctaccatttcagttgaagttcatggactcaaaaaccatttcaaaacgtgctacgacaaagcgaacatgaaagcacggcagcagcactcccaacgcgtacgagctccatctcaaacggatcaacagcggcgtagccgtgcgcgccaacttcaacagtttcgtgaagctgtggcggaagaacagcaaacagctccagtttcggctcctgtatctggtcttaaacggaacacaagcgatgccaacctggagatgaagacgggccttaaaccgaaacgtgcaagaaaagctcaagtgctgcgcgagaatcgaaccgcaagacttgcagagctattggatcgcattctggatgccacgagtctatcaagtgatgacatgaagacgttgcgtgacgggcagggctttagcacccatccactacttgcgctggcgtattttcactgttgcgctcagcatcctgacgctttcgttcacaacgatgagcagttatgtaacggggttacatggaatagtgaccctgccactattccgggatggctacatcggtcactcccctggatagtgacccaagtggcctcagagccaacagatacactttgtatgacacaaactatagggaacttaggatttgtatgcaggccaaatctgtaccaacctataaatacattcagtcttagatctaccgcttttcaagtcaagtcgtccccttcagaccagggacacgtgaacggctgttcacttggagtttgtatactcctgcttcctctgttaagaagtgctgtgtgccccgtcacaacttaagacctcccaatggtaaccccggagaacggggtagtgagtggaacggccgtacttcagaagcccagcctactgtgggagatcggcttctaagggttttagacgacccaccaggccaagaagaagctattcggtgtcaacaatccgtgcagtaagatataccaggggatattgccgcttgtgcatcgtgctgcgaaatcatcgcgaatgcagagtcctgcgccgtgcgaatgaagctgtcggagctgccagtaacgtttaaggcaacgccacaagaacgcaaagagcggtatggtggagttcctgatgatatcttgaacgagcattgccaagttgtcgtgagcaatggggacctgctctacataaatccggatctggtagtttgtgatgatgaggttgtgctatgcaagacgtgcgcagtaaatccgcggagctcgtcatttagtatcgcttgtggtcatgactatggtagaagaggtaatcttcctcagctcaacgaagttgcaaccaattgcatatgtccagtccgccgctttggaatcgaagtttctttgtctggcaagcacatgacagggcacattatttgctttccgtcgaatggtcctagtcagtgttcgaaggcgctacctcatacggatatggattgcattcctcgggtgacgtttcttggaccaaaagagcaatggcgtgttgagcagcaccgttttcaaaacttgttttccgtccccgaagatgccatatttcgctggctttctgtacttgaaaaaacgcactcttactggctggaggaaggtatttccattgatagttcgtggtgccgacgtgcggcactgagagaattggagaaacaaattcgagaaaatgttgttgtggaggcatcggattcggcagagcgtctttatgatgtctctcaagacaccaacaacaacgacgatgtaaacggaacctcatctgcggcagcggacgtgatacaagagaaatcggctgtactaaagtcacccttgagaagatcgttggacgaatctggtgttggtgttgtcgacgcaatggtagaccttctctcaggccaaacaagagcagaccatcgcgagccctctgatggcgaagcaaactgcactatcccaataacacgcgcagctgaacccgtcgtggaatgggacgcaaacggcaagttgttagcgggcgcattcccgacgctgtttctaagaggaggtgatatgctgccgaagggatcgatgccaaagcatctcgttgatcaccttttcaagtactatgacggtcgttttgaagaagatgttgtatttgtggcaacgcttttcaaccagaaacagcgtcacgccgccgtacggaaggcagctcatgtcagtgttacacatggcaaagctcttcttaaattggcgaaactagcgaatgatgatggattcaagcaacaattgctcgacgcgcagagcaatccaacgtcaacaagcgcgaaaatgctcaacgcgcagttacttcgagtgctatccatcgtcggcgaaccagttcccttttctcccttcgaaatcgcttcagctcggcccaacctagctgctctcagctgtcgatacggacttgcgcaccactggactactttggtgcctcctgagcatgacgatcttcgattacatcgaatagcgcaactccgcaaattgaagcagtggaatcaaccagagtgtgtgttttcgcgtgcaaactgcgcgtgggatgatcttccgtatgaacttcgtcgatcaccgcgtatgcgcttatcagtatctgcaaaatttcctgctctcgcagctcaaatgtttacagccaggcttaaaaatgctatacgagacactttgcgggtgatgaaagtagttcaactcgagttagtagagatttcgatcagcgggaggctggggcatttggaaaggtagctgcgtttggtgcagttgtggagccgcaaaacgatggtcgacttcatgctcatatgactgtctacaactctacgtggtcgctggagctgcttacacgattaatcccgtctcctcggctttgtgaaaaagcagcacgttggttggacagtgtgtcgcacacgcaactatcgctagcaacgcaccaatatcgagaggagtgcctaaaacgttctgctgacactactgcatctgtagcctcgacgttgttgaggccttgtgaaatggaggttccgtcggcgcaaacggcatacaaccggtttaagctagtggcagaacgttgtgctgctgccacaaactttcaccgccactctgccacttgcctaaaaggaaagcaaggacgttttaggtgccgccttagccgacccgcgggagttttcgaggacgatacaagaccgattgagttgagattgatacgcgagggtactggtacgaagcacaaagagacaaagttgtgagctttcccgtctccgaaaaaactctcgcggcgattgatagtggttacgatttggagcaagggcaactggtgcgcccccacctagacccacccattacctgggaacaacatcggccagagcgggataaaatggttgtcgaaactaaccatatcttaagcgttcttacaggaagtcacacgaattcatccgtcttggcatctgaagatgctggcgagtttgtgaatgaatatcagcgacaatatatgactaaagatacaagtgggctcaaatccgccacaagtgcaatgatgtcggcaataacgtacgctgaagagcacgggagtaccgccgaagacagccacctaccgattcgccaaggtcaatacctcgcaacgagaacggtaaatgcgtttaacggaggacatgaatggccccacgccttaatggtgtacgctctactcgggaactcatcatatctgtcgtctgactcattttggtatattttcccgcatgactatttacgagaaattgcagcaagacccgtggtcgctccggatacgagctcaactggaggtcaaagtattcagtgcgaactgcagcagataattgatgtactgtatggagaacaagatgagcaggctgaaatcatattcgacgaagatgattctagtgctgatcgaagtagccacgcacgcaaatttacggtgggtagcgaggtcgtatttcttactcaagcggagtcataccgccatcgtggaaagcattttgcagagctgtcaccaattgagtttgaatcaattgtggatatccgcaaagttatgccctcttccaacgatgaagatgtgactattcaacgaggaagaccccgcagagctggattttcgtttgcatcgagccacccattgtatccacactacgagggttgtatacgaacaaaatttatgactccgatgcttggaggtccccctcttccgacgtatcaagcggcattgaaatcagaagcaaagatggacaccctcgccaagtacgctgtagttcaaggtacgcgatattttactcgtctctaacatcgctactattacgtgcagggcaatcattggcacatacacaccctgggatcttcaaaccagggcgccaatgtttgaaccatcggctgatggtcttcgatcccttttcaagtgctgggatacccgtgaagcatcgctaattaatcgccagcgctttcgctcgatttcgaatcttctaaagcgcggctatcgtaatgaaaatagtggctgcacttattcagcatggcgtgctcggaatgccgactactggaatgaactctcctcggatgatacaccggctacagaacaaaatacagcgcaggaaactactgggcccgcaattggttgtgcagaagcacttggaattctcacaaacgatgaggatgtttttcagcttctaagcttgacgacgcactacaaatcagatgtccaagccaaaatccgctctctaagagatcggttttggaaaacgattcctgaatcaattcgtaaaactgtgacaaaaagaacgtctggccgttgtggaaacgatttggtgtactgtggcaacgaactggccgggaatacgtctagcgaggaatcgacaaagaatgcaacaaacaatcccttccgattagctgatatcgcgaagcagatacacaccttaccaccgtcctcgacagtcgatgaaagtgaaagccgaaatagtggctactgtggcgacaaacctacgcagaagaccttcatatcaccaacgacactcaaccacgaccaataccaagtgctagaccacgttgtaaatgaagtgatggacgctgtgcatggaaagaggtctcagtcgctaacattgctacacgggagtggtgggactggcaaatcgtttgtcatccgacgcattcaagcggaattggaggctcgaggcgtccacgtcataaacacttgtccaactggagccggagcttgtctgttacctggtggccaaactatacactcggcccttaaaatcgccacgaagtcaaaacggccattaaacccgaccgcactcgaaactctcaagatgcagtttgatgatactgtcgggctggtggtaggtggtaatcgatgagatatctatggtgtctactgaattgctcgcccaaatcgatgaacgacttcgttctctctacgatccgaacaaaatatttggcggaatgtcgctaatgctggtacgtaaacttctgacattcaaacatttcattatccattcactaacatgacctcaaaaggtgggcgattttcaccaactgaacgtcgttggcggcgtttccctctgcaaaaacatgtatgttgatccaaaacgagattacgatgtcaaagctcgcgatctcttccgacgatttcgcgtgttcttcttgcacgaacagctccgagctcaaaaatgcaagcgacagcagaaaaatcttgagcaatttcatcgactacccgatcgttatccaaacggtactgattggaacgatgaaaatggagcagattattttcctgtaacgccacaaattttatcatcacttcagcaagaactcacgcccacggatataatcaatgatcctgggtagctctacgactaccgcattctggtaacaggaaacttggacagagctacgctaactcaacctgccgttctcacgtttgcggcgctaaacaacacgctggtcattcgctagcgtcgtcaaattaagggaagtataccagaggctgtggcgaatgtgctgtatgacgaagatacgcatccgtatctcttcgcatactttacacaaaatgctccagcgcaaattctggataacggtgtcggcaatgtgatactgggtgtagcaaatggtacagcctgctacttgcattcgctcggatgggatgacgctgaaaaggcccaagctgcgtctgaccttatacttggcgctactcagaaaaggttgtctatagtcaatctgccatggcctccagaatacatcaacgtggtgttgatagaaccatctggagaagaagtgaatgggcttcactggcctgatcatttgaacttggaaacagcaatgctgtcaaacagtgcaggtgaaacgtacaaaagtcgagtgataattccaattggaatcattacggccaaagctgacaatgacaaagtcaagttttcgcacacctcgagaagcatttcgatgaaaccacttcgctacattcaacatgcagttgatttggcattcgctagcaccgtatggaaagcccaaggagcaacgattcttcggatgctcatgctcctacaagaaacacagcctgcgccaccatggcaatttgcgcaccacttcgttggaacatcccgcgttgaaacagtacagggattacgctgcatacctcttacaccatcgttcactcgccacgaatttctccagcttagaccagacatttttacagtgaagtggttaatgagtattggtagtgatgggtactggcaccaactcgaacaaacccaataaaaaaaaataatgaaggtctcccagcaaaagcgcagcaaccttgtagctgagcaaacgagatacagtggacatataagcggtacgaaaactcgtttcaggtttagagaaaatttccaaactgcgttcgaacttgatgtgcagtaaacggtgcgaggggtattgaggaaaagtcggctgcataaatggcgctggttggaggctagataattcctaggctgagcgattatttgtgctgtcgagaaggtttcattttcaaacgttaagacctgtagaaacacaattaaactggttagccccttacttcccaacgtttgtaccgtggaagatacggagtgtatagcctgtgacatttttttgcgtccatgctatattgtaccttcaagatgagcggtccttattcttcaaatttgtatgtacgtattcgcctttcatcgctatagtaagatcaagatagtaggttgagcgaagtgggcttgtcacccaccacgaccccgagtggtcaccgtgcatttcagaaataccgtggggaaagcaagatgctcaatacgacgagaaagacaccacgctatgagctctcagagcggaagcggcagctctgtccggaggggctgttgagtgagcgccacgcgcgtccgccgtgcggaggagaaggatgcagaaggaggcggtaagacgaagggagcgaagaaggcgacgaggaagatagatgtcaagcacgcgacggaaatggagatcgcacagtccaaggaggctcccagcgctgtgtcagctgcggtgggcgtgcccatagatgccgctgaagtgaaagagacggcgcagaacagccaacctgcgagcatagcggacgcggccaaggacacggaaggcaaagcgaagacgactgccgattttgtgccagtgatggtagaggaggttctgtctgacatgctgaatgttgttgctggatggccttgacgctaacaatcggtttgccataggctcatcctcatccgcatggtgaggtgttgggctgccaggtgggaatgtggacggaggtcacttacgcggttgtaggctgcggggagagcaatggtaggtgcggaacagcacgacggggacctggtgtttcatgtgggatagagatttttggtttttggcataagccacgttgtttgagtaacccagtgctatcttcagcagcatcgtaggcggagttgatatcgagttatgacatcatcaatcttgtttttttttaacctgaccccaatacatgcttttggtgtaagttatttataggtataccttttcctagagttagtatcgaagagtcgcttgagaatatattctttggcaccagcacgacccttcggattcagtagagggatggctcaacacctctgatctatagcccgtttcattggaacggcggctcttgtgagctcaaacttggtaattacatttgcttggcatagaggatcgtgtttgctaagtaccatgtctcactattgtaacggggtaagagataccgccactagcgcacactgtagataagaggaagcttgcaataataagctcaagtcttgtctttagggtaaaatcaactctgtttatgtatgggacgggggcggaggcccccttacccttgtgaaccactcaaatctaagtgggcacctgattggatgaaatgggtctggctcctcactttcaaccaatcagaacatgacagcaggtcacaccctagcacctacttttgtgtatgaacctatgtaacttctacctacttatacttatataaatgggccctttccatcaccctcctctctaagttgcgcctaggtaacttaagcgcagccgcacacactccaaacaactgaagaacacactggtcgacgtcggcaagggcactcggcactgcgcggccgagcggagcgcttcgcatgagcactcaagcacgcccaacgcacgcgcagccagtcgggaacatgatgcttcgggtggagcgacttggaggtgtcgctgtcggatgttcttcggtcgcgtcgacacgcgcgggtctgttgtagccatcggagatgtcgcgaccattcgcaagatcctcgtggatgatgctggtgtcgagggcggcgtcgtagtccagacacttaggcggcgcgcactcgtgaccagtcgcgcttacgagcttgtggtcgtcggtccagctggcttcatactctttcggatgtcctggtcccggtttcgatcaccggctgggcccgtgttttgcatcgggccccaccacccaaagccaggtcaaccgcgcccatcgcggcgaggcggcgcacggcggggtttgtttccctgtacggcgcgtaccactgactgctcgggtaggctgctactgttgggggttttgctgcccgttgttcctgtttcgggtcatcttcgtcttcctgtgcgtcgtctgtatgcgtgaggacgttggtagttgatattgatcgactgcacactgctacgtacatgctcggattggtgggtcgttttcggcgttgtgacgcaccatggttgtgtgtgcgtgtggccatcgggtgcgaagtacgagtctctgcgatggcgctgccgtatggaataccggcctggatgcttgtgtcgcctcctctgtgtcgcacctctataatttgatatcagtaaatcgtcgataagatggtctagagaaggaaccggagatccgcgactcgacaagcgggcacagaatcgaatggcggtggaggtgtgcgtgcagagcgtggttgagtgtgtgtgcgtgttgttatgtggcagtatgcgcgacatgtgtatttgttgaggttaggttagcggcctagtggtctagtggtatgattctcgctttgggtgcgagaggtcccggtttcgatcaccggctgggcccgtgttttgcatcgggccccaccacccaaagccaggtcaaccgcgcccatcgcggcgaggcggcgcacggcggggtttgtttccctgtacggcgcgtaccactgactgctcgggtaggctgctactgttgggggtttgctgcccgttgttcctgtttcgggtcatcttcgtcttcctgtgcgtcgtctgtatgcgtgaggacgttggtagttgatattgatcgactgcacactgctacgtacatgctcggattggtgggtcgttttcggcgttgtgacgcaccatggttgtgtgtgcgtgtggccatcgggtgcgaagtacgagtctctgcgatggcgctgccgtatggaataccggcctggatgcttgtgtcgcctcctctgtgtcgcacctctataatttgatatcagtaaatcgtcgataagatggtctagagaaggaaccggagatccgcgactcgacaagcgggcacagaatcgaatggcggtggaggtgtgcgtgcagagcgtggttgagtgtgtgtgcgtgttgttttgtggcagtatgcgcgacatgtgtatttgttgaggttaggttagcggcctagtggtctagtggtatgattctcgctttgggtgcgagaggtcccggtttcgatcaccggctgggcccgtgttttgcatcgggccccaccaccaaaagccaggtcaaccgcgcccatcgcggcgaggcggcgcacggcggggtttgtttccctgtacggcgcgtaccactgactgctcgggtaggctgctactgttgggggttttgctgcccgttgttcctgtttcgggtcatcttcgtcttcctgtgcgtcgtctgtatgcgtgaggacgttggtagttgatattgatcgactgcacactgctacgtacatgctcggattggtgggtcgttttcggcgttgtgacgcaccatggttgtgtgtgcgtgtggccatcgggtgcgaagtacgagtctctgcgatggcgctgccgtatggaataccggcctggatgcttgtgtcgcctcctctgtgtcgcacctctataatttgatatcagtaaatcgtcgataagatggtctagagaaggaaccggagatccgcgactcgacaagcgggcacagaatcgaatggcggtggaggtgtgcgtgcagagcgtggttgagtgtgtgtgcgtgttgttttgtggcagtatgcgcgacatgtgtatttgttgaggttaggttagcggcctagtggtctagtggtatgattctcgctttgggtgcgagaggtcccggttcaccggctgggcccgtgttttgcatcgggccccaccacccaaagccaggtcaaccgcgcccatcgcggcgaggcggcgcacggcggggtttgtttccctgtacggcgcgtaccactgactgcccgggtgggctgctactgttgggggttttgctgcccgttgttcctgtttcgggtcatcttcgtcttcctgtgcgtcgtctgtatgcgtgaggacgttggtagttgatattgatcgactgcacactgctacgtacatgctcggattggtgggtcgttttcggcgttgtgccgttggcccgacgcaccatggttgtgtgtgcttgtggccatcgggtgcaaagtacgagtctctgcgatggcgctgccgtatggaataccggcctggatgcttgtgtcgcctcctctgtgtcgcacctctataatttgatatcagtaaatcgtcgataagatggtctagagaaggaaccggagatccgcgactcgacaagcgggcacagaatcgaatggcggtggaggtgtgcgtgcagagcgtggttgagtgtgtgtgcgtgttgttttgtggcagtatgcgcgacatgtgtatttgttgaggttaggttagcggcctagtggtctagtggtatgattctcgctttgggtgcgagaggtcccggttcaccggctgggcccgtgttttgcatcgggccccaccacccaaagccaggtcaaccgcgcccatcgcggcgaggcggcgcacggcggggtttgtttccctgtacggcgcgtaccactgactgctcgggtgggctgctactgttggggtttttgctgcccgttgttcctgtttcgggtcatcttcgtcttcctgtgcgtcgtctgtatgcgtgaggacgttggtagttgatattgatcgactgcacactgctacgtacatgctcggattggtgggtcgttttcggcgttgtgccgttggcccgacgcaccatggttgtgtgtgcttgtggccatcgggtgcaaagtacgagtctctgcgatggcgctgccgtatggaataccggcctggatgcttgtgtcgcctcctctgtgtcgcacctctataatttgatatcagtaaatcgtcgataagatggtctagagaaggaaccggagatccgcgactcgacaagcgggcacagaatcgaatggcggtggaggtgtgcgtgcagagcgtggttgagtgtgtgtgcgtgttgttttgtggcagtatgcgcgacatgtgtatttgttgaggttaggttagcggcctaatggtctagtggtatgattctcgctttgggtgcgagaggtcccggttcaccggctgggcccgtgttttgcatcgggccccaccacccaaagccaggtcaaccgcgcccatcgcggcgaggcggcgcacggcggggtttgtttccctgtacggcgcgtaccactgactgcccgggtgggctgctactgttgggggttttgctgcccgttgttcctgtttcgggtcatcttcgtcttcctgtgcgtcgtctgtatgcgtgaggacgttggtagttgatattgatcgactgcacactgctacgtacatgctcggattggtgggtcgttttcggcgttgtgccgttggcccgacgcaccatggttgtgtgtgcgtgtggccatcgggtgcgaagtacgagtctctgcgatggcgctgccgtatggaataccggcctggatgcttgtgtcgcctcctctgtgtcgcacctctataatttgatatcagtaaatcgtcgataagatggtctagagaaggaaccggagatccgcgactcgacaagcgggcacagaatcgaatggcggtggaggtgtgcgtgcagagcgtggttgagtgtgtgtgcgtgttgttttgtggcagtatgcgcgacatgtgtatttgttgaggttaggttagcggcctagtggtctagtggtatgattctcgctttgggtgcgagaggtcccggtttcgatcaccggctgggcccgtgttttgcatcgggccccaccacccaaagccaggtcaaccgcgcccatcgcggcgaggcggcgcacggcggggtttgtttccctgtacggcgcgtaccactgactgctcgggtaggctgctactgttgggggttttgctgcccgttgttcctgtttcgggtcatcttcgtcttcctgtgcgtcgtctgtatgcgtgaggacgttggtagttgatattgatcgactgcacactgctacgtacatgctcggattggtgggtcgttttcggcgttgtgccgttggcccgacgcaccatggttgtgtgtgcgtgtggccatcgggtgcgaagtacgagtctctgcgatggcgctgccgtatggaataccggcctggatgcttgtgtcgcctcctctgtgtcgcacctctataatttgatatcagtaaatcgtcgataagatggtctagagaaggaaccggagatccgcgactcgacaagcgggcacagaatcgaatggcggtggaggtgtgcgtgcagagcgtggttgagtgtgtgtgcgtgttgttttgtggcagtatgcgcgacatgtgtatttgttgaggttaggttagcggcctagtggtctagtggtatgattctcgctttgggtgcgagaggtcccggtttcgatcaccggctgggcccgtgttttgcatcgggccccaccacccaaagccaggtcaaccgcgcccagcggcgcacggcggggtttgtttccctgtacggcgcgtaccactgactgctcgggtaggctgctactgttgggggttttgctgcccgttgttcctgtttcgggtcatcttcgtcttcctgtgcgtcgtctgtatgcgtgaggacgttggtagttgatattgatcgactgcacactgctacgtacatgctcggattggtgggtcgttttcggcgttgtgacgcaccatggttgtgtgtgcgtgtggccatcgggtgcgaagtacgagtctctgcgatggcgctgccgtatggaataccggcctggatgcttgtgtcgcctcctctgtgtcgcacctctataatttgatatcagtaaatcgtcgataagatggtctagagaaggaaccggagatccgcgactcgacaagcgggcacagaatcgaatggcggtggaggtgtgcgtgcagagcgtggttgagtgtgtgtgcgtgttgttttgtggcagtatgcgcgacatgtgtatttgttgaggttaggttagcggcctagtggtctagtggtatgattctcgctttgggtgcgagaggtcccggtttcgatcaccggctgggcccgtgttttgcatcgggccccaccacccaaagccaggtcaaccgcgcccatcggcgcaaggcggggtttgtttccctgtgtttcgcgtaccactgactgcccgggtgggctgctactggtgggggttttgctgcccgttgttcctgtttcgggtcatcttcgtcttcctgtgcgtcgtctgtatgcgtgaggacgttggtagttgatattgatcgactgcacactgctacgtacatgctcggattggtgggtcgttttcggcgttgtgccgttggcccgacgcaccatggttgtgtgtgcttgtggccatcgggtgcaaagtacgagtctctgcgatggcgctgccgtatggaataccggcctggatgcttgtgtcgcctcctctgtgtcgcacctctataatttgatatcagtaaatcgtcgataagatggtctagagaaggaaccggagatccgcgactcgacaagcgggcacagaatcgaatggcggtggaggtgtgcgtgcagagcgtggttgagtgtgtgtgcgtgttgttttgtggcagtatgcgcgacatgtgtatttgttgaggttaggttagcggcctagtggtctagtggtacgattctcgctttgggtgcgagaggtcccggttcaccggctgggcccgtgttttgcatcgggccccaccacccaaagccaggtcaaccgcgcccatcgcggcgaggcggcgcacggcggggtttgtttccctgtacggcgcgtaccactgactgctcgggtgggctgctactgttgggggttttgctgcccgttgttcctgtttcgggtcatcttcgtcttcctgtgcgtcgtctgtatgcgtgaggacgttggtagttgatattgatcgactgcacactgctacgtacatgctcggattggtgggtcgatttcggcgttgtgccgttggcccgacgcaccatggttgtgtgtgcttgtggccatcgtgttttacatcgggccccaccacccaaagccaggtcaaccgcgcccatcgcggcgaggcggcgcacggcggggtttgtttccctgtacggcgcgtaccactgactgctcgggtgggctgctactgttgggggttttgctgcccgttgttcctgtttcgggtcatcttcgtcttcctgtgcgtcgtctgtatgcgtgaggacgttggtagttgatattgatcgactgcacactgctacgtacatgctcggattggtgggtcgatttcggcgttgtgccgttggcccgacgcaccatggttgtgtgtgcttgtggccatcgtgttttacatcgggccccaccacccaaagccaggtcaaccgcgcccatcgcggcgaggcggcgcacggcggggtttgtttccctgtacggcgcgtaccactgactgctcgggtgggctgctactgttgggggttttgctgcccgttgttcctgtttcgggtcatcttcgtcttcctgtgcgtcgtctgtatgcgtgaggacgttggtagttggtattgatcgactgcacactgctacgtacatgctcggattggtgggtcgttttcggcgttgtgccgttggcccgacgcaccatggttgtgtgtgcttgtggccatcgggtgcaaagtacgagtctctgcgatggcgctgccgtatggaataccggcctggatgcttgtgtcgcctcctctgtgtcgcacctctataatttgatatcagtaaatcgtcgataagatggtctagagaaggaaccggagatccgcgactcgacaagcgggcacagaatcgaatggtggtggaggtgtgcgtgcagagcgtggttgagtgtgtgtgcgtgttgttttgtggcagtatgcgcgacatgtgtatttgttgaggttaggttagcggcctagtggtctagtggtatgattctcgctttgggtgcgagaggtcccggttcaccggctgggcccgtgttttgcatcgggccccaccacccaaagccaggtcaacccgtttgtttgttggttgcattcatagtatactccaaaaacatttttttgtttcaagagtgattcatgctcttttgtaagacgatacttagcccgagaatgcctatcataagacaaagcgtcttacgttttccgatcaatgcgttttgactacatcttggtttttgtataccagtggctacattgcatattatctgtcaaaacataagacagtttgtcggacactagtttgcgccatacaattggccaaaagtgttcaggtcacagcggcatcgttgccgcggacgcggtggcaacgttgagcgccgaaacgatgcagttgcatggtgcggtagggtaagtagcctcttgttcacacacgaagcgatgtgcctgtagttggccgctggcagcaagcttaaatatcggcataatgactgcacgaacgcgtgcatgcagtccgtggagctgttccactcagaggtgcagccgttgtagggcacggagttacgatgaagttggcagacgtaaactaagagggacaaatagctcgtaacggtactacatgtacattttaatgtagtaaattttatgcttgagcgtacatcatagtagttgtgaaggcgtggcagccagggaacggtgttgccagtgggcttcccgagatcctccaaccccctcttacctaatcattacagtccagcaacaaaatgcaaccacgtattctgcaacggcgataatacctagatcttatacctacgacgctgaggtgcggaggagctccacactgctgcgcgggcgctcggcgcgcgccatatcgctgctgggctcgaccttcggcatcggcgagttactcagtatctcctgcaactaagccactgcctgcagccatactttttgtcgatgctacagcgtagactggtttgcgtatgcgcgctctatccgaatctccatctcctatgtagtgttagtactttactgaagaaaggagagttggcgtggtggggtgaacgactgttgtcgtcgactgttgtcgttcaccccagtaaagcgaagaaacattgctccactacgggaacaaacggtcgcatgataactgtgctatgatgtccttacattccattcatggcaagtatatttaaatcttctagcaggaggttagtgcatggcgtcaggatcaaaggcccggacatttcaaggggcatttttcaagtgcgctgcctctagtaaagggggcaaaatgcgcacacagataaatcagtccaatttacgagccgagatgcagcaacactcgagactacataatacaatattaaccaatgaaattgctacatttgatttgtcgtcaaactgtcttacgaatgctcgacacaagtgattgtaagcatagtacatttcggaagtgcttgattagagttaatatgaagtaatagatggatggcttgatacattcttatcactacttagccacgtacaaaagcaatattgtacagcaagacatatgaaatcacaaccaagcaaagaagcgtggagtagataccgaagatctcaagactattcgctaactcagctggtgttcctgctggtatgacccgagcccgattcactcgcttgaccagatgcagcgcaattagcaaacacgtttcacagctgatcgcctttaatacccttcatttaatcgcaatatactataccggcatgctatcgaggctcgatcggacaagatctggcaagacaaaaatcacagttatgatacctaaagatcacttcatccagcttagggacccaccagacaaatcaaactggacaatctgttcagcacaagtacaccatgctacattttgttgatcatttcagcgaaggacgaactcgttgccgtgatcaatcaagtatgtttgactgtgaaacatcgcttaccagttgagtacgagtctgagttagagctgtagtcctcactgcaatcggcgtgggagcaggaatgtcggattcctcgtggtagttcgagtaggagtgaaggccggagccgaggccggagctatcgtgcctgggtctaggttagagcgcggttggctaagaatgatgggtgtgaggtgcaacattgaaggtagagacgattggacctatcactattatattctcatgattgcctaaaaagagtttgctttatggtaggctaaccaagtgccgccttgcatcacttcaccatcagtaccaagacttgggatatcttatagtgtttatcaataaacagtcagtctgtagcctctgcgtcgtacacccagcatattttattacatcgcgatgcggtgtcaaattacatataggcaaaatatttaccgacaatttaatcaagtgttgaaaacgttatgattatattctaacggtttagatgtgctctgttaaggtacaatatatacacccgtttctgttttctttagaaaggttaagagggcgctccagtgcccttttatacatttgttgtttattcttgaattattcggaaaatacgcatacaaggctgttcacgattttatggaggccaagggcgaaaagtgaataagtacaagggttttgccttcacgaccaaacagaagttacatatatgaaatgtacaagaaatcgaggaccaagacatccgccctgccctgttacctgacaaaaacgagagcgaccagacacgtagttggggacgattttatcgaaacataatgaggcacataactggtgggttctgcgatgaaggcgttcccggaacaaccgctatgccccgtgtcctcgtggaaacgctagccaacaacgaaggcatcaggaaatttaagggcttgtgatactggcataagaactttaagccgcgatatcgactttcccgtcgaggtcaagcgcgtgtccctccccgaatcaatgctccgcccttagctctgtcagaggccaagctggaacgcttattggagccgaccgtcgtgtactcagggagcggttgcaccgtccagctcggaattatctcactcagcaaaggaatacggatttttgcgtcttcgaacgatgccttatatgctttcactgtgtaacttgtattcactaacgctaacgcagatgtaccggttgcattttggatcttccctagagcagcgagaagatgtctgcaaggcagttgtaagtgttcacgtttgttgcatcgcatacacttacgtggtgctagcttgacgatgtgtgtgcgggcgatcttcggaattacgccatcaccacttccgacttttttgtgataggatcatcgacgtagaattccgtgtctgaacaattaaccggtcggacgctgcacgaggactttaacagctccttgttaaaatactttttttgtatttggggtcacattgcacttgtagtcggtccaaagttttagtgactcgtgctttgctgttaatgtcgctagttgacttgatagccaagagaagctaggtgtttctgggcgtctcgatgctttccacgatcagagaatagcggtagattggccatagaaattccactagcgatgcaattagcaaagaaccagctgaagttttcatttgtctctagcgggacaacctttctatctccaccaagtccaatcattgtaagacaaattccattgtagttgtcacttttcatgtgagtaccgtctgtttgaagaacgggaagtaaaagagaatgaatgcgctacaagcgggacgacagaaataaataatcggaaaaatttcccatcaacatccaattggcagctcactctagaaccagggttcatggattcgaaggcagtaaaaaaatcaggcagcaggctatagtcatccatgatctttgtttgcatgaggcgcttgcgtatagctcgatacaaagtcgcctgacgcccatccatgttttttatcttgtctatttcttatagggcgtttgatacccgcgcaagtcctgtactatgaccttcaacaaaagcgctgttgaatcgga
